(19) United States
(12) Patent Application Publication
(10) Pub. No.: US 2023/0340537 A1
(43) Pub. Date: Oct. 26, 2023

(54) SMALL TYPE II-D CAS PROTEINS AND METHODS OF USE THEREOF

(71) Applicants: THE BROAD INSTITUTE, INC., Cambridge, MA (US); MASSACHUSETTS INSTITUTE OF TECHNOLOGY, Cambridge, MA (US)

(72) Inventors: Feng Zhang, Cambridge, MA (US); Soumya Kannan, Cambridge, MA (US); Han Altae-Tran, Cambridge, MA (US)

(21) Appl. No.: 17/793,115

(22) PCT Filed: Jan. 15, 2021
(86) PCT No.: PCT/US2021/013753

§ 371 Date: Jul. 15, 2022

Related U.S. Application Data
(60) Provisional application No. 62/962,672, filed on Jan. 17, 2020.

(51) Int. Cl. C12N 15/90; C12N 9/22; C12N 15/10; C12N 9/78

(52) U.S. Cl. CPC C12N 15/90; C12N 9/22; C12N 15/102; C12N 9/78; C12Y 305/04004; C12Y 305/04005; C12Y 207/07049

(57) ABSTRACT

Described herein are systems, methods, and compositions capable of targeting nucleic acids. Describe in certain exemplary embodiments herein are a class of small Cas proteins (Type II-D Cas proteins) and systems thereof. Also described in certain exemplary embodiments herein are methods of modifying target sequences using the class of small Cas proteins (Type II-D Cas proteins) and systems thereof described herein.

### CROSS-REFERENCE TO RELATED APPLICATIONS

[0001] This application claims the benefit of U.S. Provisional Application No. 62/962,672 filed Jan. 17, 2020. The entire content of the above-identified application is hereby fully incorporated herein by reference.

### STATEMENT REGARDING FEDERALLY SPONSORED RESEARCH

[0002] This invention was made with government support under Grant No. HL141201 awarded by the National Institutes of Health. The government has certain rights in the invention.

### SEQUENCE LISTING

[0003] This application contains a sequence listing filed in electronic form as an ASCII.txt file entitled BROD-5020WP_ST25.txt, created on Jan. 15, 2021 and having a size of 867,977 bytes. The content of the sequence listing is incorporated herein in its entirety

### TECHNICAL FIELD

[0004] The subject matter disclosed herein is generally directed to compositions, systems, and methods of modifying target polynucleotides. Such compositions and systems include Clustered Regularly Interspaced Short Palindromic Repeats (CRISPR) and other Cas-based systems or components thereof.

### BACKGROUND

[0005] Recent advances in genome sequencing techniques and analysis methods have significantly accelerated the ability to catalog and map genetic factors associated with a diverse range of biological functions and diseases. Precise genome targeting technologies are needed to enable systematic reverse engineering of causal genetic variations by allowing selective perturbation of individual genetic elements, as well as to advance synthetic biology, biotechnological, and medical applications. Although genome-editing techniques such as designer zinc fingers, transcription activator-like effectors (TALEs), homing meganucleases, and CRISPR-Cas systems are available for producing targeted genome perturbations, there remains a need for new genome engineering technologies that employ new and/or improved strategies and molecular mechanisms and are affordable, easy to set up, scalable, and amenable to targeting multiple positions within the eukaryotic and other genomes. This would provide a major resource for new applications in genome engineering and biotechnology.

[0006] Citation or identification of any document in this application is not an admission that such a document is available as prior art to the present invention.

### SUMMARY

[0007] Described in exemplary embodiments herein are engineered nucleic acid targeting systems comprising a Cas protein comprising a RuvC domain and an HNH domain, wherein the Cas protein is about 950 amino acids or less in size, wherein the Cas protein is capable of forming a complex with a nucleic acid guide molecule, and wherein the nucleic acid guide molecule is capable of sequence-specific binding of a target nucleic acid sequence on a target polynucleotide.

[0008] In certain example embodiments, the Cas protein is less than or equal to 780 amino acids in size.

[0009] In certain example embodiments, the Cas protein has no association with Cas1, Cas2, Cas4, or Csn2.

[0010] In certain example embodiments, the Cas protein is a Type II Cas protein.

[0011] In certain example embodiments, the Type II Cas protein is a Type II-D Cas protein.

[0012] In certain example embodiments, the Cas protein is encoded at least in part or in whole by a polynucleotide sequence that is about 70-100 percent identical to any one of SEQ ID NOs: 31-133 or a portion thereof.

[0013] In certain example embodiments, the Cas protein is encoded at least in part or in whole by a polynucleotide sequence that is about 70-100 percent identical to any one of SEQ ID NOs: SEQ ID NOs: 31, 37, 39, 40, 44, 49, 55, 57, 63, 64, 68, 70, 76, and 80-133 or a portion thereof.

[0014] In some embodiments, the Cas protein is from or originated from Gammaproteobacteria bacterium AqS3, Deltaproteobacteria bacterium GWF2_42_12, JGI Metagenome: IMG 3300025323, Nitrospirae bacterium RBG_13_39_12, or Nitrospiraceae bacterium isolate UBA9935.

[0015] In certain example embodiments, the Cas protein is capable of forming a complex with two or more nucleic guide molecules, wherein each guide molecule is capable of sequence-specific binding of a target nucleic acid sequence, wherein each target sequence is different.

[0016] In certain example embodiments, the target sequences are on the same or are on different target polynucleotides.

[0017] In certain example embodiments, the guide molecule or the two or more guide molecules are capable of sequence-specific binding a target sequence in vitro, in situ, ex vivo, or in vivo.

[0018] In certain example embodiments, the guide molecule or the two or more guide molecules are capable of sequence-specific binding a target sequence in a prokaryotic cell, eukaryotic cell, a virus, or a combination thereof.

[0019] In certain example embodiments, the Cas protein is operably coupled to one or more nuclear localization signals.

[0020] In certain example embodiments, the Cas protein is operably coupled to one or more nuclear export signals.

[0021] In certain example embodiments, the Cas protein lacks one or more catalytic activates.

[0022] In certain example embodiments, the Cas protein lacks nuclease activity.

[0023] In certain example embodiments, the Cas protein is a nickase.

[0024] In certain example embodiments, the Cas protein is operably coupled to or associated with one or more functional domains.

[0025] In certain example embodiments, the one or more functional domains is/are one or more heterologous functional domains.

[0026] In certain example embodiments, the one or more functional domains has one or more activities selected from deaminase activity, methylase activity, demethylase activity, transcription activation activity, transcription repression activity, transcription release factor activity, histone modification activity, nuclease activity, single-strand RNA cleavage activity, double-strand RNA cleavage activity, single-strand DNA cleavage activity, double-strand DNA cleavage activity, nucleic acid binding activity, transposition activity, reverse transcription activity, or a combination thereof.

[0027] In certain example embodiments, the one or more functional domains is/are capable of cleaving the target polynucleotide.

[0028] In certain example embodiments, the one or more functional domains is capable of modifying transcription or translation of the target polynucleotide.

[0029] In certain example embodiments, the engineered nucleic acid targeting system further comprises a recombination template.

[0030] In certain example embodiments, the recombination template is operably coupled to, complexed with, or is associated with the Cas protein, the nucleic acid guide molecule, or both.

[0031] In certain example embodiments, the recombination template is a homology-directed repair (HDR) recombination template.

[0032] In certain example embodiments, the nucleic acid targeting system comprises a tracrRNA.

[0033] In certain example embodiments, the Cas protein is a chimeric protein comprising a first polypeptide fragment from a first Cas protein and a second polypeptide fragment from a second Cas protein.

[0034] In certain example embodiments, the engineered nucleic acid targeting system further comprises a deaminase or catalytic domain thereof.

[0035] In certain example embodiments, the deaminase is an adenosine deaminase or a cytidine deaminase.

[0036] In certain example embodiments, the deaminase or catalytic domain thereof is operably coupled to, complexed with, or otherwise associated with the Cas protein, a guide molecule, or both or is capable of operably coupling to, complexing with, or otherwise associated with the Cas protein, a guide molecule, or both after delivery to a cell.

[0037] In certain example embodiments, the nucleotide deaminase or catalytic domain thereof has been modified to increase its activity against a DNA-RNA heteroduplex, to reduce off-target effects, or both.

[0038] In certain example embodiments, the engineered nucleic acid targeting system further comprises a reverse transcriptase or functional domain thereof, wherein the reverse transcriptase or functional domain thereof is optionally operably coupled to, is capable of complexing with, or is otherwise associated with the Cas protein, the guide molecule, or both.

[0039] In certain example embodiments, the engineered nucleic acid targeting system further comprises one or more nucleic acid guide molecules, wherein each of the one or more nucleic acid guide molecules is capable of capable of forming a complex or is complexed with the Cas protein, and wherein each of the one or more nucleic acid guide molecules is capable of sequence specific binding of a target sequence in a target polynucleotide.

[0040] In certain example embodiments, the engineered nucleic acid targeting system is capable of modifying a sequence of the target polynucleotide.

[0041] In certain example embodiments, the modification is
[0042] a. insertion of one or more polynucleotides;
[0043] b. deletion of one or more polynucleotides;
[0044] c. conversion of a C•G base pair to a T•A base pair;
[0045] d. conversion of an A•T base pair to a G•C base pair;
[0046] e. or a combination thereof.

[0047] In certain example embodiments, the modification alters a transcription product of the target polynucleotide, a translation product of the target polynucleotide, or both.

[0048] In certain example embodiments, the modification alters transcription, translation, or both of the target polynucleotide.

[0049] Described in certain example embodiments herein are polynucleotides comprising one or more nucleic acid sequences that encode one or more components of the engineered nucleic acid system of any one of preceding paragraphs or described in greater detail elsewhere herein.

[0050] In certain example embodiments, the polynucleotide is codon optimized for expression in a eukaryotic cell.

[0051] In certain example embodiments, the eukaryotic cell is a human cell or a non-human animal cell.

[0052] Described in certain example embodiments herein are vector systems comprising one or more vectors comprising one or more polynucleotides comprising one or more nucleic acid sequence that encode one or more components of the engineered nucleic acid systems of any one of the preceding paragraphs and as described in greater detail elsewhere herein, and optionally one or more regulatory elements operably coupled to one or more polynucleotides.

[0053] In certain example embodiments, the one or more of the one or more vectors are viral vectors.

[0054] In certain example embodiments, the viral vector(s) is/are a retroviral vector(s), lentiviral vector(s), adenoviral vector(s), adeno-associated viral vector(s), herpes simplex viral vector(s), or a combination thereof.

[0055] Described in certain example embodiments are delivery compositions comprising
[0056] a. an engineered nucleic acid targeting system of any one of the preceding paragraphs and as described in greater detail elsewhere herein;
[0057] b. one or more polynucleotides of any one of the preceding paragraphs and as described in greater detail elsewhere herein;
[0058] c. one or more vector systems of any one of the preceding paragraphs and as described in greater detail elsewhere herein; or
[0059] d. a combination thereof, and a delivery vehicle, wherein a, b, c, d, or e, are associated with or operably coupled to the delivery vehicle.

[0060] Described in certain example embodiments are cells or progeny thereof comprising:
[0061] a. an engineered nucleic acid targeting system of any one of the preceding paragraphs and as described in greater detail elsewhere herein;
[0062] b. one or more polynucleotides of any one of the preceding paragraphs and as described in greater detail elsewhere herein;
[0063] c. one or more vector systems of any one of the preceding paragraphs and as described in greater detail elsewhere herein;
[0064] d. a delivery formulation of any one of the preceding paragraphs and as described in greater detail elsewhere herein;
[0065] e. one or more polynucleotide modifications produced by an engineered nucleic acid targeting system of any one of the preceding paragraphs and as described in greater detail elsewhere herein; or
[0066] f. a combination thereof.

[0067] In certain example embodiments, the cell or progeny thereof is a prokaryotic or eukaryotic cell.

[0068] Described in certain example embodiments herein are tissues, organs, or organisms comprising a cell or progeny thereof as in any one of the preceding paragraphs and as described in greater detail elsewhere herein or a population thereof.

[0069] Described in certain example embodiments herein are pharmaceutical formulations comprising
[0070] a. an engineered nucleic acid targeting system of any one of the preceding paragraphs and as described in greater detail elsewhere herein;
[0071] b. one or more polynucleotides of any one of the preceding paragraphs and as described in greater detail elsewhere herein;
[0072] c. one or more vector systems of any one of the preceding paragraphs and as described in greater detail elsewhere herein;
[0073] d. a delivery formulation of any one of the preceding paragraphs and as described in greater detail elsewhere herein;
[0074] e. a cell or progeny thereof as in any one of the preceding paragraphs and as described in greater detail elsewhere herein;
[0075] f. a tissue, an organ, or an organism as in any one of the preceding paragraphs and as described in greater detail elsewhere herein; or
[0076] g. a combination thereof, and a pharmaceutically acceptable carrier.

[0077] Described in certain example embodiments herein are products produced by a cell or progeny thereof as in any one of the preceding paragraphs and as described in greater detail elsewhere herein or a population thereof, a tissue, organ, or organism as in any one of the preceding paragraph and as described in greater detail elsewhere herein, or both.

[0078] Described in certain example embodiments herein are methods of modifying one or more target polynucleotides, the method comprising contacting the one or more target polynucleotides with an engineered nucleic acid targeting system of any one of the preceding paragraphs and as described in greater detail elsewhere herein, wherein the engineered nucleic acid targeting system is directed to the one or more target sequences by the guide nucleic acid guide molecule(s) of the engineered nucleic acid targeting system, whereby one or more target polynucleotides is/are modified.

[0079] In certain example embodiments the modification is
[0080] a. insertion of one or more polynucleotides;
[0081] b. deletion of one or more polynucleotides;
[0082] c. conversion of a C•G base pair to a T•A base pair;
[0083] d. conversion of an A•T base pair to a G•C base pair; or
[0084] e. a combination thereof.

[0085] In certain example embodiments, contacting occurs in vitro, in situ, ex vivo, or in vivo.

[0086] In certain example embodiments, contacting occurs within a cell.

[0087] Described in certain example embodiments herein are modified polynucleotides and/or modified cells or progeny thereof produced from a method as in of any one of the preceding paragraphs and as described in greater detail elsewhere herein.

[0088] In certain example embodiments, the cell is a eukaryotic cell or progeny thereof.

[0089] In certain example embodiments, the cell or progeny thereof is a human cell or progeny thereof or a non-human animal cell or progeny thereof.

[0090] In certain example embodiments, the cell or progeny thereof is a plant cell.

[0091] Described in certain example embodiments herein are methods of treating and/or preventing a disease, condition, or a symptom thereof in a subject in need thereof, the method comprising administering to the subject in need thereof
[0092] a. an engineered nucleic acid targeting system of any one of the preceding paragraphs and as described in greater detail elsewhere herein;
[0093] b. one or more polynucleotides of any one of the preceding paragraphs and as described in greater detail elsewhere herein;
[0094] c. one or more vector systems of any one of the preceding paragraphs and as described in greater detail elsewhere herein;
[0095] d. a delivery formulation as in any one of the preceding paragraphs and as described in greater detail elsewhere herein;
[0096] e. a cell or progeny thereof as in any one of the preceding paragraphs and as described in greater detail elsewhere herein;
[0097] f. a tissue, an organ, or an organism as in any one of the preceding paragraphs and as described in greater detail elsewhere herein;
[0098] g. a pharmaceutical formulation as in any one of the preceding paragraphs and as described in greater detail elsewhere herein;
[0099] h. a product as in any one of the preceding paragraphs and as described in greater detail elsewhere herein; or
[0100] i. any combination thereof.

[0101] Described in certain example embodiments herein are methods of treating and/or preventing a disease, condition, or a symptom thereof in a subject or cell thereof, the method comprising modifying one or more target polynucleotides in or from the subject or cell thereof by contacting the one or more target polynucleotides with an engineered nucleic acid targeting system of any one of claims 1 to 36, wherein the engineered nucleic acid targeting system is directed to the one or more target sequences in one or more target polynucleotides by the guide nucleic acid guide molecule(s) of the engineered nucleic acid targeting system, whereby one or more target polynucleotides is/are modified.

[0102] In certain example embodiments, contacting occurs in vitro, in situ, ex vivo, or in vivo.

[0103] In certain example embodiments, contacting occurs ex vivo in a cell obtained from the subject or progeny thereof and wherein the method further comprises administering cell or obtained from the subject or progeny to the subject after contacting the cell or progeny thereof with the engineered targeting system.

[0104] Described in certain example embodiments herein are methods of generating a modified organism, the method comprising modifying one or more target polynucleotides in a cell by a method as in any one of the preceding paragraphs and as described in greater detail elsewhere herein.

[0105] In certain example embodiments, the organism is a non-human animal.

[0106] In certain example embodiments, the organism is a plant.

[0107] Described in certain example embodiments herein are methods of identifying a trait of interest in an organism where the trait of interest is encoded by one or more target polynucleotides, the method comprising contacting the organism or sample therefrom comprising polynucleotides with an engineered nucleic acid targeting system of any one of the preceding paragraphs and as described in greater detail elsewhere herein, wherein the engineered nucleic acid targeting system is directed to the one or more target sequences by the guide nucleic acid guide molecule(s) of the engineered nucleic acid targeting system, whereby one or more target polynucleotides, and thereby the one or more traits, are identified.

[0108] In certain example embodiments, one or more target polynucleotides are modified by the engineered nucleic acid targeting system.

[0109] In certain example embodiments, the method is performed in vitro, in situ, ex vivo, or in vivo.

[0110] In certain example embodiments, the organism is a plant, non-human animal, or human.

[0111] Described in certain example embodiments are methods of identifying a polynucleotide modifier, the method comprising exposing one or more polynucleotides to one or more candidate agents; and detecting one or more modified polynucleotides by contacting the one or more polynucleotides exposed to one or more candidate agents with an engineered nucleic acid targeting system of any one of the preceding paragraphs and as described in greater detail elsewhere herein, wherein the engineered nucleic acid targeting system is directed to the one or more target sequences of one or more modified target polynucleotides present in the sample by the guide nucleic acid guide molecule(s) of the engineered nucleic acid targeting system, whereby one or more modified target polynucleotides present in the sample are identified.

[0112] Described in certain example embodiments herein are methods of detecting one or more target polynucleotide present in a sample comprising polynucleotides, the method comprising contacting, in vitro, one or more target polynucleotides present in the sample with an engineered nucleic acid targeting system of any one of the preceding paragraphs and as described in greater detail elsewhere herein, wherein the engineered nucleic acid targeting system is directed to the one or more target sequences of one or more target polynucleotides present in the sample by the guide nucleic acid guide molecule(s) of the engineered nucleic acid targeting system, whereby one or more target polynucleotides present in the sample are identified.

[0113] These and other aspects, objects, features, and advantages of the example embodiments will become apparent to those having ordinary skill in the art upon consideration of the following detailed description of example embodiments.

### BRIEF DESCRIPTION OF THE DRAWINGS

[0114] An understanding of the features and advantages of the present invention will be obtained by reference to the following detailed description that sets forth illustrative embodiments, in which the principles of the invention may be utilized, and the accompanying drawings of which:

[0115] FIG. 1—shows a sequence view of exemplary Type II-D IntCas9s (light gray bar), direct repeats (DR) (black bar), and tracrRNA (med gray bar).

[0116] The figures herein are for illustrative purposes only and are not necessarily drawn to scale.

### DETAILED DESCRIPTION OF THE EXAMPLE EMBODIMENTS

### General Definitions

[0117] Unless defined otherwise, technical and scientific terms used herein have the same meaning as commonly understood by one of ordinary skill in the art to which this disclosure pertains. Definitions of common terms and techniques in molecular biology may be found in Molecular Cloning: A Laboratory Manual, 2^{nd} edition (1989) (Sambrook, Fritsch, and Maniatis); Molecular Cloning: A Laboratory Manual, 4^{th} edition (2012) (Green and Sambrook); Current Protocols in Molecular Biology (1987) (F. M. Ausubel et al. eds.); the series Methods in Enzymology (Academic Press, Inc.): PCR 2: A Practical Approach (1995) (M. J. MacPherson, B. D. Hames, and G. R. Taylor eds.): Antibodies, A Laboratory Manual (1988) (Harlow and Lane, eds.): Antibodies A Laboratory Manual, 2^{nd} edition 2013 (E. A. Greenfield ed.); Animal Cell Culture (1987) (R. I. Freshney, ed.); Benjamin Lewin, Genes IX, published by Jones and Bartlet, 2008 (ISBN 0763752223); Kendrew et al. (eds.), The Encyclopedia of Molecular Biology, published by Blackwell Science Ltd., 1994 (ISBN 0632021829); Robert A. Meyers (ed.), Molecular Biology and Biotechnology: a Comprehensive Desk Reference, published by VCH Publishers, Inc., 1995 (ISBN 9780471185710); Singleton et al., Dictionary of Microbiology and Molecular Biology 2nd ed., J. Wiley & Sons (New York, N.Y. 1994), March, Advanced Organic Chemistry Reactions, Mechanisms and Structure 4th ed., John Wiley & Sons (New York, N.Y. 1992); and Marten H. Hofker and Jan van Deursen, Transgenic Mouse Methods and Protocols, 2^{nd} edition (2011)

[0118] As used herein, the singular forms “a” “an”, and “the” include both singular and plural referents unless the context clearly dictates otherwise.

[0119] The term “optional” or “optionally” means that the subsequent described event, circumstance or substituent may or may not occur, and that the description includes instances where the event or circumstance occurs and instances where it does not.

[0120] The recitation of numerical ranges by endpoints includes all numbers and fractions subsumed within the respective ranges, as well as the recited endpoints.

[0121] The terms “about” or “approximately” as used herein when referring to a measurable value such as a parameter, an amount, a temporal duration, and the like, are meant to encompass variations of and from the specified value, such as variations of +/−10% or less, +/−5% or less, +/−1% or less, and +/−0.1% or less of and from the specified value, insofar such variations are appropriate to perform in the disclosed invention. It is to be understood that the value to which the modifier “about” or “approximately” refers is itself also specifically, and preferably, disclosed.

[0122] As used herein, a “biological sample” may contain whole cells and/or live cells and/or cell debris. The biological sample may contain (or be derived from) a “bodily fluid”. The present invention encompasses embodiments wherein the bodily fluid is selected from amniotic fluid, aqueous humour, vitreous humour, bile, blood serum, breast milk, cerebrospinal fluid, cerumen (earwax), chyle, chyme, endolymph, perilymph, exudates, feces, female ejaculate, gastric acid, gastric juice, lymph, mucus (including nasal drainage and phlegm), pericardial fluid, peritoneal fluid, pleural fluid, pus, rheum, saliva, sebum (skin oil), semen, sputum, synovial fluid, sweat, tears, urine, vaginal secretion, vomit and mixtures of one or more thereof. Biological samples include cell cultures, bodily fluids, cell cultures from bodily fluids. Bodily fluids may be obtained from a mammal organism, for example by puncture, or other collecting or sampling procedures.

[0123] The terms “subject,” “individual,” and “patient” are used interchangeably herein to refer to a vertebrate, preferably a mammal, more preferably a human. Mammals include, but are not limited to, murines, simians, humans, farm animals, sport animals, and pets. Tissues, cells and their progeny of a biological entity obtained in vivo or cultured in vitro are also encompassed.

[0124] Various embodiments are described hereinafter. It should be noted that the specific embodiments are not intended as an exhaustive description or as a limitation to the broader aspects discussed herein. One aspect described in conjunction with a particular embodiment is not necessarily limited to that embodiment and can be practiced with any other embodiment(s). Reference throughout this specification to “one embodiment”, “an embodiment,” “an example embodiment,” means that a particular feature, structure or characteristic described in connection with the embodiment is included in at least one embodiment of the present invention. Thus, appearances of the phrases “in one embodiment,” “in an embodiment,” or “an example embodiment” in various places throughout this specification are not necessarily all referring to the same embodiment, but may. Furthermore, the particular features, structures or characteristics may be combined in any suitable manner, as would be apparent to a person skilled in the art from this disclosure, in one or more embodiments. Furthermore, while some embodiments described herein include some, but not other features included in other embodiments, combinations of features of different embodiments are meant to be within the scope of the invention. For example, in the appended claims, any of the claimed embodiments can be used in any combination.

[0125] As used herein with reference to the relationship between DNA, cDNA, cRNA, mRNA, protein/peptides, and the like “corresponding to” or “encoding” (used interchangeably herein) refers to the underlying biological relationship between these different molecules. As such, one of skill in the art would understand that operatively “corresponding to” can direct them to determine the possible underlying and/or resulting sequences of other molecules given the sequence of any other molecule which has a similar biological relationship with these molecules. For example, from a DNA sequence an RNA sequence can be determined and from an RNA sequence a cDNA sequence can be determined.

[0126] All publications, published patent documents, and patent applications cited herein are hereby incorporated by reference to the same extent as though each individual publication, published patent document, or patent application was specifically and individually indicated as being incorporated by reference.

### Overview

[0127] Embodiments disclosed herein provide non-natural or engineered compositions and systems as well as their use in methods of modifying a target polynucleotide. In general, the systems include a small Cas Type II-D protein. The Cas protein may be recruited to a target sequence by a guide RNA and generate a break on the target sequence. In some embodiments, the guide RNA can further include a template with desired mutations or other sequence elements. In some exemplary embodiments, the Cas protein is a nickase that generates a single-strand break on nucleic acid molecule.

[0128] Other compositions, compounds, methods, features, and advantages of the present disclosure will be or become apparent to one having ordinary skill in the art upon examination of the following drawings, detailed description, and examples. It is intended that all such additional compositions, compounds, methods, features, and advantages be included within this description, and be within the scope of the present disclosure.

### Small Type II-D Cas Proteins and Systems

[0129] Described herein are small Type II-D Cas proteins (or simply Type II-D Cas proteins) and systems thereof (e.g., CRISPR-Cas systems) that include one or more of the Type II-D Cas proteins or variant(s) thereof. Exemplary embodiments of small Type II-D Cas proteins and CRISPR-Cas systems that can include the small Type II-D Cas proteins are described in greater detail below. Thus, it will be appreciated that where a CRISPR-Cas system or component thereof is described below (such as a guide molecule, Cas protein, or other component) that such a system or component is referring to one that can include or associate with small Type II-D Cas protein described herein. Likewise, where the term Cas protein is used below, it will be appreciated that such a Cas protein can be a small Type II-D Cas protein or variant thereof.

[0130] In general, a Cas protein (used interchangeably herein with CRISPR protein, CRISPR enzyme, CRISPR-Cas protein, CRISPR-Cas enzyme, Cas, Cas effector, or CRISPR effector) and/or a crRNA (used interchangeably with a guide RNA, and RNA component) is a component of a CRISPR-Cas system. A CRISPR-Cas system or CRISPR system refers collectively to transcripts and other elements involved in the expression of or directing the activity of CRISPR-associated (“Cas”) genes, including sequences encoding a Cas gene, a tracr (trans-activating CRISPR) sequence (e.g. tracrRNA or an active partial tracrRNA), a tracr-mate sequence (encompassing a “direct repeat” and a tracrRNA-processed partial direct repeat in the context of an endogenous CRISPR system), a guide sequence (also referred to as a “spacer” in the context of an endogenous CRISPR system), or “RNA(s)” as that term is herein used (e.g., RNA(s) to guide Cas, such as Type II-D Cas, e.g. CRISPR RNA and transactivating (tracr) RNA or a single guide RNA (sgRNA) (chimeric RNA)) or other sequences and transcripts from a CRISPR locus. In general, a CRISPR system is characterized by elements that promote the formation of a CRISPR complex at the site of a target sequence (also referred to as a protospacer in the context of an endogenous CRISPR system). CRISPR-Cas systems are described in further detail below.

[0131] In some embodiments, the CRISPR-Cas system incorporating a small Type II-D Cas protein has only one small Type II-D Cas protein. In some embodiments, the CRISPR-Cas system incorporating a small Type II-D Cas protein has two or more two small Type II-D Cas protein. Where the CRISPR-Cas system includes more than one small Type II-D Cas proteins it will be appreciated that such small Type II-D Cas proteins can be homogeneous (i.e., the same) or heterogenous (i.e., different from each other in at least one aspect (e.g., small Type II-D Cas protein, optional additional functional domain(s), linker (if present), etc.).

[0132] Generally, and without being bound by theory, in some embodiments a CRISPR-Cas system can include one, a pair, or more of small Type II-D Cas proteins.

### Small Type II-D Cas Proteins

[0133] Described in example embodiments herein are small Type II-D Cas proteins that have at least one RuvC domain and at least one HNH domain. In some examples, the small Cas proteins may be small Type II Cas proteins. In some embodiments, the Type II Cas proteins are Type II-D Cas proteins. In particular examples, the Type II Cas proteins are Type II-D IntCas9 proteins. In some examples, the IntCas9 protein may be from or derived from Gammaproteobacteria bacterium AqS3, Deltaproteobacteria bacterium GWF2_42_12, JGI Metagenome: IMG 3300025323, Nitrospirae bacterium RBG_13_39_12, Nitrospiraceae bacterium isolate UBA9935, or orthologs thereof. In certain example embodiments, the small Cas proteins may be about 950 amino acids or less in size. In certain example embodiments, the small Cas proteins may be less than or equal to 780 amino acids in size. In some embodiments, the IntCas9 protein is less than or equal to 780 amino acids in size.

[0134] In some embodiments, the small Type II-D Cas proteins include or are composed entirely of one or more polypeptides that is/are encoded by one or more polynucleotides that each have a sequence that is 70-100 percent identical to one of SEQ ID NOs: 31, 37, 39, 40, 44, 49, 55, 57, 63, 64, 68, 70, 76, and 80-133 or portion thereof (including, but not limited to, those regions in e.g., SEQ ID NOs. 80-133 identified in Tables 14-15 as a protein of interest (POI)). In some embodiments, the small Type II-D Cas proteins include or are composed entirely of one or more polypeptides that is/are encoded by one or more polynucleotides that each have a sequence that is about 70, 71, 72, 73, 74, 75, 76, 77, 78, 79, 80, 81, 82, 83, 84, 85, 86, 87, 88, 89, 90, 91, 92, 93, 94, 95, 96, 97, 98, 99, or 100 percent identical to any one of SEQ ID NOs: SEQ ID NOs: 31, 37, 39, 40, 44, 49, 55, 57, 63, 64, 68, 70, 76, and 80-133 or portion thereof (including, but not limited to, those regions in e.g., SEQ ID NOs. 80-133 identified in Tables 14-15 as a protein of interest (POI)). In some embodiments, the small Type II-D Cas proteins include or are composed entirely of one or more polypeptides that is/are encoded by one or more polynucleotides that each have a sequence that is about 90-100 percent identical to any one of SEQ ID NOs. SEQ ID NOs: 31, 37, 39, 40, 44, 49, 55, 57, 63, 64, 68, 70, 76, and 80-133 or portion thereof (including, but not limited to, those regions in e.g., SEQ ID NOs. 80-133 identified in Tables 14-15 as a protein of interest (POI)), such as 91, 92, 93, 94, 95, 96, 97, 98, or 99 to 100 percent identical to any one of SEQ ID NOs. SEQ ID NOs: 31, 37, 39, 40, 44, 49, 55, 57, 63, 64, 68, 70, 76, and 80-133 or portion thereof (including, but not limited to, those regions in e.g., SEQ ID NOs. 80-133 identified in Tables 14-15 as a protein of interest (POI)). In some embodiments, the small Type II-D Cas proteins include or are composed entirely of one or more polypeptides that is/are encoded by one or more polynucleotides that each have a sequence that is about 95-96, 95-97, 95-98, 95-99, 96-97, 96-98, 96-99, 97-98, 97-99, or 98-99 percent identical to any one of SEQ ID NOs. SEQ ID NOs: 31, 37, 39, 40, 44, 49, 55, 57, 63, 64, 68, 70, 76, and 80-133 or portion thereof (including, but not limited to, those regions in e.g., SEQ ID NOs. 80-133 identified in Tables 14-15 as a protein of interest (POI)). See also, Tables 13-15 and Appendices A and B of U.S. Provisional Application Ser. No. 62/962,672, which is incorporated by reference as if expressed in its entirety herein. In some embodiments, a small Type II-D CRISPR-Cas system polynucleotide is 70-100 identical to any one of SEQ ID NOs: 31, 37, 39, 40, 44, 49, 55, 57, 63, 64, 68, 70, 76, and 80-133 or portion thereof (including, but not limited to, those regions in e.g., SEQ ID NOs. 80-133 identified in Tables 14-15 as a protein of interest (POI)).

[0135] The “portion thereof” referred to above in reference to the encoding polynucleotides is about 5, 10, 15, 20, 25, 30, 35, 40, 45, 50, 55, 60, 65, 70, 75, 80, 85, 90, 95, 100, 105, 110, 115, 120, 125, 130, 135, 140, 145, 150, 155, 160, 165, 170, 175, 180, 185, 190, 195, 200, 205, 210, 215, 220, 225, 230, 235, 240, 245, 250, 255, 260, 265, 270, 275, 280, 285, 290, 295, 300, 305, 310, 315, 320, 325, 330, 335, 340, 345, 350, 355, 360, 365, 370, 375, 380, 385, 390, 395, 400, 405, 410, 415, 420, 425, 430, 435, 440, 445, 450, 455, 460, 465, 470, 475, 480, 485, 490, 495, 500, 505, 510, 515, 520, 525, 530, 535, 540, 545, 550, 555, 560, 565, 570, 575, 580, 585, 590, 595, 600, 605, 610, 615, 620, 625, 630, 635, 640, 645, 650, 655, 660, 665, 670, 675, 680, 685, 690, 695, 700, 705, 710, 715, 720, 725, 730, 735, 740, 745, 750, 755, 760, 765, 770, 775, 780, 785, 790, 795, 800, 805, 810, 815, 820, 825, 830, 835, 840, 845, 850, 855, 860, 865, 870, 875, 880, 885, 890, 895, 900, 905, 910, 915, 920, 925, 930, 935, 940, 945, 950, 955, 960, 965, 970, 975, 980, 985, 990, 995, 1000, 1005, 1010, 1015, 1020, 1025, 1030, 1035, 1040, 1045, 1050, 1055, 1060, 1065, 1070, 1075, 1080, 1085, 1090, 1095, 1100, 1105, 1110, 1115, 1120, 1125, 1130, 1135, 1140, 1145, 1150, 1155, 1160, 1165, 1170, 1175, 1180, 1185, 1190, 1195, 1200, 1205, 1210, 1215, 1220, 1225, 1230, 1235, 1240, 1245, 1250, 1255, 1260, 1265, 1270, 1275, 1280, 1285, 1290, 1295, 1300, 1305, 1310, 1315, 1320, 1325, 1330, 1335, 1340, 1345, 1350, 1355, 1360, 1365, 1370, 1375, 1380, 1385, 1390, 1395, 1400, 1405, 1410, 1415, 1420, 1425, 1430, 1435, 1440, 1445, 1450, 1455, 1460, 1465, 1470, 1475, 1480, 1485, 1490, 1495, 1500, 1505, 1510, 1515, 1520, 1525, 1530, 1535, 1540, 1545, 1550, 1555, 1560, 1565, 1570, 1575, 1580, 1585, 1590, 1595, 1600, 1605, 1610, 1615, 1620, 1625, 1630, 1635, 1640, 1645, 1650, 1655, 1660, 1665, 1670, 1675, 1680, 1685, 1690, 1695, 1700, 1705, 1710, 1715, 1720, 1725, 1730, 1735, 1740, 1745, 1750, 1755, 1760, 1765, 1770, 1775, 1780, 1785, 1790, 1795, 1800, 1805, 1810, 1815, 1820, 1825, 1830, 1835, 1840, 1845, 1850, 1855, 1860, 1865, 1870, 1875, 1880, 1885, 1890, 1895, 1900, 1905, 1910, 1915, 1920, 1925, 1930, 1935, 1940, 1945, 1950, 1955, 1960, 1965, 1970, 1975, 1980, 1985, 1990, 1995, 2000, 2005, 2010, 2015, 2020, 2025, 2030, 2035, 2040, 2045, 2050, 2055, 2060, 2065, 2070, 2075, 2080, 2085, 2090, 2095, 2100, 2105, 2110, 2115, 2120, 2125, 2130, 2135, 2140, 2145, 2150, 2155, 2160, 2165, 2170, 2175, 2180, 2185, 2190, 2195, 2200, 2205, 2210, 2215, 2220, 2225, 2230, 2235, 2240, 2245, 2250, 2255, 2260, 2265, 2270, 2275, 2280, 2285, 2290, 2295, 2300, 2305, 2310, 2315, 2320, 2325, 2330, 2335, 2340, 2345, 2350, 2355, 2360, 2365, 2370, 2375, 2380, 2385, 2390, 2395, 2400, 2405, 2410, 2415, 2420, 2425, 2430, 2435, 2440, 2445, 2450, 2455, 2460, 2465, 2470, 2475, 2480, 2485, 2490, 2495, 2500, 2505, 2510, 2515, 2520, 2525, 2530, 2535, 2540, 2545, 2550, 2555, 2560, 2565, 2570, 2575, 2580, 2585, 2590, 2595, 2600, 2605, 2610, 2615, 2620, 2625, 2630, 2635, 2640, 2645, 2650, 2655, 2660, 2665, 2670, 2675, 2680, 2685, 2690, 2695, 2700, 2705, 2710, 2715, 2720, 2725, 2730, 2735, 2740, 2745, 2750, 2755, 2760, 2765, 2770, 2775, 2780, 2785, 2790, 2795, 2800, 2805, 2810, 2815, 2820, 2825, 2830, 2835, 2840, 2845, 2850, 2855, 2860, 2865, 2870, 2875, 2880, 2885, 2890, 2895, 2900, 2905, 2910, 2915, 2920, 2925, 2930, 2935, 2940, 2945, 2950, 2955, 2960, 2965, 2970, 2975, 2980, 2985, 2990, 2995, or 3000 consecutive nucleotides of any one of SEQ ID NOs. 31, 37, 39, 40, 44, 49, 55, 57, 63, 64, 68, 70, 76, and 80-133.

[0136] In some examples, the Type II-D Cas protein is a IntCas9. In some embodiments, IntCas9 is a crRNA-dependent endonuclease that contains two unrelated nuclease domains, RuvC and HNH, which are responsible for cleavage of the displaced (non-target) and target DNA strands, respectively, in the crRNA-target DNA complex. Type II-D Cas may be a polypeptide or fragment thereof having DNA binding activity, and/or DNA cleavage activity (e.g., endonuclease or nickase activity). “Type II-D Cas function” can be defined by any of a number of assays including, but not limited to, fluorescence polarization-based nucleic acid bind assays, fluorescence polarization-based strand invasion assays, transcription assays, EGFP disruption assays, DNA cleavage assays, and/or Surveyor assays, for example, as described herein. By “Type II-D nucleic acid molecule” is meant a polynucleotide encoding a Type II-D Cas polypeptide or fragment thereof. Type II-D Cas recognizes foreign DNA using Protospacer Adjacent Motif (PAM) sequence and the base pairing of the target DNA by the guide RNA (gRNA). The relative ease of inducing targeted strand breaks at any genomic loci by Type II-D Cas has enabled efficient genome editing in multiple cell types and organisms. Derivatives of Type II-D Cas disclosed herein can also be used as transcriptional activators/repressors.

[0137] In some embodiments, the Cas type II-D or other Cas protein is less than 1000 amino acids in size. For example, the Cas protein may be less than about 950, less than 900, less than 890, less than 880, less than 870, less than 860, less than 850, less than 840, less than 830, less than 820, less than 810, less than 800, less than 790, less than 780, less than 770, less than 760, less than 750, less than 700, less than 650, or less than 600 amino acids in size. In some examples, the Cas protein is less than 780 amino acids in size.

[0138] In some embodiments, the CRISPR-Cas system includes a Type II-D Cas protein that is less than 1000 amino acids in size. For example, the Type II-D Cas protein can be less than 950, less than 900, less than 890, less than 880, less than 870, less than 860, less than 850, less than 840, less than 830, less than 820, less than 810, less than 800, less than 790, less than 780, less than 770, less than 760, less than 750, less than 700, less than 650, or less than 600 amino acids in size. In some examples, the Type II-D Cas protein is less than about 950 amino acids or less than 900 amino acids in size. In some examples, the Cas protein is less than 850 amino acids in size. In some embodiments, the Type II-D Cas protein is a small Type II-D Cas protein that is less than about 950 amino acids, less than about 900 amino acids, less than about 850 amino acids in size. In some embodiments, the CRISPR-Cas system includes a Type II-D Cas that is less than 850 amino acids in size.

[0139] In some embodiments, the Type II-D Cas protein is about 600, 601, 602, 603, 604, 605, 606, 607, 608, 609, 610, 611, 612, 613, 614, 615, 616, 617, 618, 619, 620, 621, 622, 623, 624, 625, 626, 627, 628, 629, 630, 631, 632, 633, 634, 635, 636, 637, 638, 639, 640, 641, 642, 643, 644, 645, 646, 647, 648, 649, 650, 651, 652, 653, 654, 655, 656, 657, 658, 659, 660, 661, 662, 663, 664, 665, 666, 667, 668, 669, 670, 671, 672, 673, 674, 675, 676, 677, 678, 679, 680, 681, 682, 683, 684, 685, 686, 687, 688, 689, 690, 691, 692, 693, 694, 695, 696, 697, 698, 699, 700, 701, 702, 703, 704, 705, 706, 707, 708, 709, 710, 711, 712, 713, 714, 715, 716, 717, 718, 719, 720, 721, 722, 723, 724, 725, 726, 727, 728, 729, 730, 731, 732, 733, 734, 735, 736, 737, 738, 739, 740, 741, 742, 743, 744, 745, 746, 747, 748, 749, 750, 751, 752, 753, 754, 755, 756, 757, 758, 759, 760, 761, 762, 763, 764, 765, 766, 767, 768, 769, 770, 771, 772, 773, 774, 775, 776, 777, 778, 779, 780, 781, 782, 783, 784, 785, 786, 787, 788, 789, 790, 791, 792, 793, 794, 795, 796, 797, 798, 799, 800, 801, 802, 803, 804, 805, 806, 807, 808, 809, 810, 811, 812, 813, 814, 815, 816, 817, 818, 819, 820, 821, 822, 823, 824, 825, 826, 827, 828, 829, 830, 831, 832, 833, 834, 835, 836, 837, 838, 839, 840, 841, 842, 843, 844, 845, 846, 847, 848, 849, 850, 851, 852, 853, 854, 855, 856, 857, 858, 859, 860, 861, 862, 863, 864, 865, 866, 867, 868, 869, 870, 871, 872, 873, 874, 875, 876, 877, 878, 879, 880, 881, 882, 883, 884, 885, 886, 887, 888, 889, 890, 891, 892, 893, 894, 895, 896, 897, 898, 899, 900, 901, 902, 903, 904, 905, 906, 907, 908, 909, 910, 911, 912, 913, 914, 915, 916, 917, 918, 919, 920, 921, 922, 923, 924, 925, 926, 927, 928, 929, 930, 931, 932, 933, 934, 935, 936, 937, 938, 939, 940, 941, 942, 943, 944, 945, 946, 947, 948, 949, or 950 amino acids in size or less.

[0140] In some embodiments, the CRISPR-Cas system includes one or more Type II-D Cas proteins that is/are at least 100, at least 200, at least 300, at least 400, at least 500, at least 600, at least 700, at least 800, or at least 900, amino acids but are less than 1000 amino acids in size.

[0141] In some embodiments, the small Cas proteins are a subgroup of Type II Cas proteins and are less than about 950 amino acids in size. In some embodiments, the small Cas proteins are a subgroup of Type II Cas proteins and are less than or equal to 780 amino acid in size.

### CRISPR-Cas Systems

[0142] As previously described, the small type II-D Cas proteins can be included in a CRISPR-Cas system with or without additional Cas proteins described elsewhere herein. In general, a CRISPR-Cas or CRISPR system as used in herein and in documents, such as WO 2014/093622 (PCT/US2013/074667), refers collectively to genes, transcripts, proteins, and other elements involved in the expression of, directing the activity of CRISPR-associated (“Cas”) genes or gene products, and/or the gene products themselves (e.g. Cas proteins), including, but not limited to, sequences encoding a Cas gene, a tracr (trans-activating CRISPR) sequence (e.g. tracrRNA or an active partial tracrRNA), a tracr-mate sequence (encompassing a “direct repeat” and a tracrRNA-processed partial direct repeat in the context of an endogenous CRISPR system), a guide sequence (also referred to as a “spacer” in the context of an endogenous CRISPR system), or “RNA(s)” as that term is herein used (e.g., RNA(s) to guide Cas, such as a Type II-D Cas, e.g. CRISPR RNA and transactivating (tracr) RNA or a single guide RNA (sgRNA) (chimeric RNA)) or other sequences and transcripts from a CRISPR locus. In general, a CRISPR system is characterized by elements that promote the formation of a CRISPR complex at the site of a target sequence (also referred to as a protospacer in the context of an endogenous CRISPR system). See, e.g., Shmakov et al. (2015) “Discovery and Functional Characterization of Diverse Class 2 CRISPR-Cas Systems”, Molecular Cell, DOI: dx.doi.org/10.1016/j.molcel.2015.10.008 and Makarova et al., 2020. Nature Rev Microbiol. 18:67-83. As previously described, such CRISPR-Cas systems described herein include one or more small Type II-D Cas proteins or variants thereof.

[0143] In some embodiments, CRISPR-Cas system includes one or more Cas proteins that have at least one RuvC domain and at least one HNH domain. The Cas protein may have a RuvC-like domain that contains an inserted HNH domain.

[0144] One or more components (e.g., a Type II-D Cas protein, a guide molecule or component thereof (e.g., a direct repeat), or other component) of a Type II-D CRISPR-Cas system described herein can be encoded by one or more polynucleotides according to any one of SEQ ID NOs: 31-133 or a portion thereof. One or more components (e.g., a Type II-D Cas protein, a guide molecule or component thereof (e.g., a direct repeat), or other component) of a Type II-D CRISPR-Cas system described herein can be encoded by one or more polynucleotides that is/are 70-100 percent identical to any one of SEQ ID NOs. 31-133 or portion thereof. One or more components (e.g., a Type II-D Cas protein, a guide molecule or component thereof (e.g., a direct repeat), or other component) of a Type II-D CRISPR-Cas system described herein can be encoded by one or more polynucleotides that is/are 70, 71, 72, 73, 74, 75, 76, 77, 78, 79, 80, 81, 82, 83, 84, 85, 86, 87, 88, 89, 90, 91, 92, 93, 94, 95, 96, 97, 98, 99, or 100 percent identical to any one of SEQ ID NOs. 31-133 or a portion thereof. One or more components (e.g., a Type II-D Cas protein, a guide molecule or component thereof (e.g., a direct repeat), or other component) of a Type II-D CRISPR-Cas system described herein can be encoded by one or more polynucleotides that is/are 90-100 percent identical to any one of SEQ ID NOs. 31-133, such as 91, 92, 93, 94, 95, 96, 97, 98, or 99 to 100 percent identical to any one of SEQ ID NOs. 31-133, or a portion thereof. One or more components (e.g., a Type II-D Cas protein, a guide molecule or component thereof (e.g., a direct repeat), or other component) of a Type II-D CRISPR-Cas system described herein can be encoded by one or more polynucleotides that is/are about 95-96, 95-97, 95-98, 95-99, 96-97, 96-98, 96-99, 97-98, 97-99, or 98-99 percent identical to any one of SEQ ID NOs. 31-133.

[0145] In some embodiments, the portion thereof is a feature or sequence that is identified in any of Tables 13-15, such as a specific feature noted therein. As the phrase is used above, The “portion thereof” referred to above in reference to the encoding polynucleotides is about 5, 10, 15, 20, 25, 30, 35, 40, 45, 50, 55, 60, 65, 70, 75, 80, 85, 90, 95, 100, 105, 110, 115, 120, 125, 130, 135, 140, 145, 150, 155, 160, 165, 170, 175, 180, 185, 190, 195, 200, 205, 210, 215, 220, 225, 230, 235, 240, 245, 250, 255, 260, 265, 270, 275, 280, 285, 290, 295, 300, 305, 310, 315, 320, 325, 330, 335, 340, 345, 350, 355, 360, 365, 370, 375, 380, 385, 390, 395, 400, 405, 410, 415, 420, 425, 430, 435, 440, 445, 450, 455, 460, 465, 470, 475, 480, 485, 490, 495, 500, 505, 510, 515, 520, 525, 530, 535, 540, 545, 550, 555, 560, 565, 570, 575, 580, 585, 590, 595, 600, 605, 610, 615, 620, 625, 630, 635, 640, 645, 650, 655, 660, 665, 670, 675, 680, 685, 690, 695, 700, 705, 710, 715, 720, 725, 730, 735, 740, 745, 750, 755, 760, 765, 770, 775, 780, 785, 790, 795, 800, 805, 810, 815, 820, 825, 830, 835, 840, 845, 850, 855, 860, 865, 870, 875, 880, 885, 890, 895, 900, 905, 910, 915, 920, 925, 930, 935, 940, 945, 950, 955, 960, 965, 970, 975, 980, 985, 990, 995, 1000, 1005, 1010, 1015, 1020, 1025, 1030, 1035, 1040, 1045, 1050, 1055, 1060, 1065, 1070, 1075, 1080, 1085, 1090, 1095, 1100, 1105, 1110, 1115, 1120, 1125, 1130, 1135, 1140, 1145, 1150, 1155, 1160, 1165, 1170, 1175, 1180, 1185, 1190, 1195, 1200, 1205, 1210, 1215, 1220, 1225, 1230, 1235, 1240, 1245, 1250, 1255, 1260, 1265, 1270, 1275, 1280, 1285, 1290, 1295, 1300, 1305, 1310, 1315, 1320, 1325, 1330, 1335, 1340, 1345, 1350, 1355, 1360, 1365, 1370, 1375, 1380, 1385, 1390, 1395, 1400, 1405, 1410, 1415, 1420, 1425, 1430, 1435, 1440, 1445, 1450, 1455, 1460, 1465, 1470, 1475, 1480, 1485, 1490, 1495, 1500, 1505, 1510, 1515, 1520, 1525, 1530, 1535, 1540, 1545, 1550, 1555, 1560, 1565, 1570, 1575, 1580, 1585, 1590, 1595, 1600, 1605, 1610, 1615, 1620, 1625, 1630, 1635, 1640, 1645, 1650, 1655, 1660, 1665, 1670, 1675, 1680, 1685, 1690, 1695, 1700, 1705, 1710, 1715, 1720, 1725, 1730, 1735, 1740, 1745, 1750, 1755, 1760, 1765, 1770, 1775, 1780, 1785, 1790, 1795, 1800, 1805, 1810, 1815, 1820, 1825, 1830, 1835, 1840, 1845, 1850, 1855, 1860, 1865, 1870, 1875, 1880, 1885, 1890, 1895, 1900, 1905, 1910, 1915, 1920, 1925, 1930, 1935, 1940, 1945, 1950, 1955, 1960, 1965, 1970, 1975, 1980, 1985, 1990, 1995, 2000, 2005, 2010, 2015, 2020, 2025, 2030, 2035, 2040, 2045, 2050, 2055, 2060, 2065, 2070, 2075, 2080, 2085, 2090, 2095, 2100, 2105, 2110, 2115, 2120, 2125, 2130, 2135, 2140, 2145, 2150, 2155, 2160, 2165, 2170, 2175, 2180, 2185, 2190, 2195, 2200, 2205, 2210, 2215, 2220, 2225, 2230, 2235, 2240, 2245, 2250, 2255, 2260, 2265, 2270, 2275, 2280, 2285, 2290, 2295, 2300, 2305, 2310, 2315, 2320, 2325, 2330, 2335, 2340, 2345, 2350, 2355, 2360, 2365, 2370, 2375, 2380, 2385, 2390, 2395, 2400, 2405, 2410, 2415, 2420, 2425, 2430, 2435, 2440, 2445, 2450, 2455, 2460, 2465, 2470, 2475, 2480, 2485, 2490, 2495, 2500, 2505, 2510, 2515, 2520, 2525, 2530, 2535, 2540, 2545, 2550, 2555, 2560, 2565, 2570, 2575, 2580, 2585, 2590, 2595, 2600, 2605, 2610, 2615, 2620, 2625, 2630, 2635, 2640, 2645, 2650, 2655, 2660, 2665, 2670, 2675, 2680, 2685, 2690, 2695, 2700, 2705, 2710, 2715, 2720, 2725, 2730, 2735, 2740, 2745, 2750, 2755, 2760, 2765, 2770, 2775, 2780, 2785, 2790, 2795, 2800, 2805, 2810, 2815, 2820, 2825, 2830, 2835, 2840, 2845, 2850, 2855, 2860, 2865, 2870, 2875, 2880, 2885, 2890, 2895, 2900, 2905, 2910, 2915, 2920, 2925, 2930, 2935, 2940, 2945, 2950, 2955, 2960, 2965, 2970, 2975, 2980, 2985, 2990, 2995, or 3000 consecutive nucleotides of any one of SEQ ID NOs. 31-133.

[0146] In some embodiments, the CRISPR-Cas system includes a Type II-D effector (e.g., a Type II-D Cas effector) protein from or originated from an organism from a genus comprising Streptococcus, Campylobacter, Nitratifractor, Staphylococcus, Parvibaculum, Roseburia, Neisseria, Gluconacetobacter, Azospirillum, Sphaerochaeta, Lactobacillus, Eubacterium, Corynebacte, Carnobacterium, Rhodobacter, Listeria, Paludibacter, Clostridium, Lachnospiraceae, Clostridiaridium, Leptotrichia, Francisella, Legionella, Alicyclobacillus, Methanomethyophilus, Porphyromonas, Prevotella, Bacteroidetes, Helcococcus, Letospira, Desulfovibrio, Desulfonatronum, Opitutaceae, Tuberibacillus, Bacillus, Brevibacilus, Methylobacterium or Acidaminococcus, Streptococcus, Campylobacter, Nitratifractor, Staphylococcus, Parvibaculum, Roseburia, Neisseria, Gluconacetobacter, Azospirillum, Sphaerochaeta, Lactobacillus, Eubacterium, Corynebacter, Sutterella, Legionella, Treponema, Filifactor, Eubacterium, Streptococcus, Lactobacillus, Mycoplasma, Bacteroides, Flaviivola, Flavobacterium, Sphaerochaeta, Azospirillum, Gluconacetobacter, Neisseria, Roseburia, Parvibaculum, Staphylococcus, Nitratifractor, Mycoplasma, or Campylobacter

[0147] In some embodiments of the CRISPR-Cas system that include a Type II-D effector, the Type II-D Cas effector protein is from or originated from an organism selected from S. mutans, S. agalactiae, S. equisimilis, S. sanguinis, S. pneumonia, C. jejuni, C. coli; N. salsuginis, N. tergarcus; S. auricularis, S. carnosus; N. meningitides, N. gonorrhoeae, L. monocytogenes, L. ivanovii; C. botulinum, C. difficile, C. tetani, or C. sordellii, Francisella tularensis 1, Francisella tularensis subsp. novicida, Prevotella albensis, Lachnospiraceae bacterium MC2017 1, Butyrivibrio proteoclasticus, Peregrinibacteria bacterium GW2011_GWA2_33_10, Parcubacteria bacterium GW2011_GWC2_44_17, Smithella sp. SCADC, Acidaminococcus sp. BV3L6, Lachnospiraceae bacterium MA2020, Candidatus Methanoplasma termitum, Eubacterium eligens, Moraxella bovoculi 237, Leptospira inadai, Lachnospiraceae bacterium ND2006, Porphyromonas crevioricanis 3, Prevotella disiens, and Porphyromonas macacae. In particular embodiments, the effector protein is a Type II-D Cas effector protein from an organism from or originated from Streptococcus pyogenes, Staphylococcus aureus, or Streptococcus thermophilus Type II-D Cas. In some embodiments, the Type II-D Cas is derived from a bacterial species selected from Streptococcus pyogenes, Staphylococcus aureus, or Streptococcus thermophilus Type II-D Cas. In certain embodiments, the Type II-D Cas is derived from a bacterial species selected from Francisella tularensis 1, Prevotella albensis, Lachnospiraceae bacterium MC2017 1, Butyrivibrio proteoclasticus, Peregrinibacteria bacterium GW2011_GWA2_33_10, Parcubacteria bacterium GW2011_GWC2_44_17, Smithella sp. SCADC, Acidaminococcus sp. BV3L6, Lachnospiraceae bacterium MA2020, Candidatus Methanoplasma termitum, Eubacterium eligens, Moraxella bovoculi 237, Leptospira inadai, Lachnospiraceae bacterium ND2006, Porphyromonas crevioricanis 3, Prevotella disiens and Porphyromonas macacae. In certain embodiments, the Type II-D Cas is derived from a bacterial species selected from Acidaminococcus sp. BV3L6, Lachnospiraceae bacterium MA2020. In certain embodiments, the effector protein is derived from a subspecies of Francisella tularensis 1, including but not limited to Francisella tularensis subsp. Novicida.

### Specialized Cas-Based Systems

[0148] In some embodiments, the system that can include the small Type II-D Cas protein(s) is a Cas-based system that is capable of performing a specialized function or activity. For example, the Cas protein may be fused, operably coupled to, or otherwise associated with one or more functionals domains. In certain example embodiments, the Cas protein may be a catalytically dead Cas protein (“dCas”) and/or have nickase activity. A nickase is a Cas protein that cuts only one strand of a double stranded target. In such embodiments, the dCas or nickase provide a sequence specific targeting functionality that delivers the functional domain to or proximate a target sequence. Example functional domains that may be fused to, operably coupled to, or otherwise associated with a Cas protein can be or include, but are not limited to a nuclear localization signal (NLS) domain, a nuclear export signal (NES) domain, a translational activation domain, a transcriptional activation domain (e.g. VP64, p65, MyoD1, HSF1, RTA, and SET7/9), a translation initiation domain, a transcriptional repression domain (e.g., a KRAB domain, NuE domain, NcoR domain, and a SID domain such as a SID4X domain), a nuclease domain (e.g., FokI), a histone modification domain (e.g., a histone acetyltransferase), a light inducible/controllable domain, a chemically inducible/controllable domain, a transposase domain, a homologous recombination machinery domain, a recombinase domain, an integrase domain, and combinations thereof. Methods for generating catalytically dead Cas9 or a nickase Cas9 (WO 2014/204725, Ran et al. Cell. 2013 Sep. 12; 154(6):1380-1389), Cas12 (Liu et al. Nature Communications, 8, 2095 (2017), and Cas13 (International Patent Publication Nos. WO 2019/005884 and WO2019/060746) are known in the art and incorporated herein by reference. Such methods can be adapted for modifying the small Type II-D Cas proteins described herein.

[0149] In some embodiments, the functional domains can have one or more of the following activities: methylase activity, demethylase activity, translation activation activity, translation initiation activity, translation repression activity, transcription activation activity, transcription repression activity, transcription release factor activity, histone modification activity, nuclease activity, single-strand RNA cleavage activity, double-strand RNA cleavage activity, single-strand DNA cleavage activity, double-strand DNA cleavage activity, molecular switch activity, chemical inducibility, light inducibility, and nucleic acid binding activity. In some embodiments, the one or more functional domains may comprise epitope tags or reporters. Non-limiting examples of epitope tags include histidine (His) tags, V5 tags, FLAG tags, influenza hemagglutinin (HA) tags, Myc tags, VSV-G tags, and thioredoxin (Trx) tags. Examples of reporters include, but are not limited to, glutathione-S-transferase (GST), horseradish peroxidase (HRP), chloramphenicol acetyltransferase (CAT) beta-galactosidase, beta-glucuronidase, luciferase, green fluorescent protein (GFP), HcRed, DsRed, cyan fluorescent protein (CFP), yellow fluorescent protein (YFP), and auto-fluorescent proteins including blue fluorescent protein (BFP).

[0150] The one or more functional domain(s) may be positioned at, near, and/or in proximity to a terminus of the effector protein (e.g., a Cas protein). In embodiments having two or more functional domains, each of the two can be positioned at or near or in proximity to a terminus of the effector protein (e.g., a Cas protein). In some embodiments, such as those where the functional domain is operably coupled to the effector protein, the one or more functional domains can be tethered or linked via a suitable linker (including, but not limited to, GlySer linkers) to the effector protein (e.g., a Cas protein). When there is more than one functional domain, the functional domains can be same or different. In some embodiments, all the functional domains are the same. In some embodiments, all of the functional domains are different from each other. In some embodiments, at least two of the functional domains are different from each other. In some embodiments, at least two of the functional domains are the same as each other.

[0151] Other suitable functional domains can be found, for example, in International Patent Publication No. WO 2019/018423.

### Split CRISPR-Cas Systems

[0152] In some embodiments, the CRISPR-Cas system is a split CRISPR-Cas system. See e.g., Zetche et al., 2015. Nat. Biotechnol. 33(2): 139-142 and International Patent Publication WO 2019/018423, the compositions and techniques of which can be used in and/or adapted for use with the present invention. Split CRISPR-Cas proteins are set forth herein and in documents incorporated herein by reference in further detail herein. In certain embodiments, each part of a split CRISPR protein are attached to a member of a specific binding pair, and when bound with each other, the members of the specific binding pair maintain the parts of the CRISPR protein in proximity. In certain embodiments, each part of a split CRISPR protein is associated with an inducible binding pair. An inducible binding pair is one which is capable of being switched “on” or “off” by a protein or small molecule that binds to both members of the inducible binding pair. In some embodiments, CRISPR proteins may preferably split between domains, leaving domains intact. In particular embodiments, said Cas split domains (e.g., RuvC and HNH domains in the case of Type II-D Cas proteins) can be simultaneously or sequentially introduced into the cell such that said split Cas domain(s) process the target nucleic acid sequence in the algae cell. The reduced size of the split Cas compared to the wild type Cas allows other methods of delivery of the systems to the cells, such as the use of cell penetrating peptides as described herein.

### DNA and RNA Base Editing

[0153] The present disclosure also provides for base editing systems. In some embodiments, the CRISPR-Cas system is capable of DNA and/or RNA base editing. Thus, in some embodiments the CRISPR-Cas system can be a base editing system. As used herein, “base editing” refers generally to the process of polynucleotide modification via a CRISPR-Cas-based or Cas-based system that does not include excising nucleotides to make the modification. Base editing can convert base pairs at precise locations without generating excess undesired editing byproducts that can be made using traditional CRISPR-Cas systems.

[0154] In general, a base-editing system may comprise a deaminase (e.g., an adenosine deaminase or cytidine deaminase) fused with a nucleic acid-guided nuclease, e.g., Cas protein. The Cas protein may be a dead Cas protein or a Cas nickase protein. In certain examples, the system comprises a mutated form of an adenosine deaminase fused with a dead CRISPR-Cas or CRISPR-Cas nickase. The mutated form of the adenosine deaminase may have both adenosine deaminase and cytidine deaminase activities.

[0155] The based editing systems may be capable of modifying a single nucleotide in a target polynucleotide. The modification may repair or correct a G→A or C→T point mutation, a T→C or A→G point mutation, or a pathogenic SNP. Accordingly, the compositions and systems may remedy a disease caused by a G→A or C→T point mutation, a T→C or A→G point mutation, or a pathogenic SNP.

[0156] In some embodiments, the present disclosure provides an engineered adenosine deaminase. The engineered adenosine deaminase may comprise one or more mutations herein. In some embodiments, the engineered adenosine deaminase has cytidine deaminase activity. In certain examples, the engineered adenosine deaminase has both cytidine deaminase activity and adenosine deaminase. In some cases, the modifications by base editors herein may be used for targeting post-translational signaling or catalysis. In some embodiments, compositions herein comprise nucleotide sequence comprising encoding sequences for one or more components of a base editing system. A base-editing system may comprise a deaminase (e.g., an adenosine deaminase or cytidine deaminase) fused, coupled to, or otherwise associated with a Cas protein or a variant thereof (such as a small Type II-D Cas protein or variant thereof described herein).

[0157] In some cases, the adenosine deaminase is double-stranded RNA-specific adenosine deaminase (ADAR). Examples of ADARs include those described Yiannis A Savva et al., The ADAR protein family, Genome Biol. 2012; 13(12): 252, which is incorporated by reference in its entirety. In some examples, the ADAR may be hADAR1. In certain examples, the ADAR may be hADAR2. The sequence of hADAR2 may be that described under Accession No. AF525422.1.

[0158] In some embodiments, the adenosine deaminase is a TadA protein such as E. coli TadA. See Kim et al., Biochemistry 45:6407-6416 (2006); Wolf et al., EMBO J. 21:3841-3851 (2002). In some embodiments, the adenosine deaminase is mouse ADA. See Grunebaum et al., Curr. Opin. Allergy Clin. Immunol. 13:630-638 (2013). In some embodiments, the adenosine deaminase is human ADAT2. See Fukui et al., J. Nucleic Acids 2010:260512 (2010). In some embodiments, the deaminase (e.g., adenosine or cytidine deaminase) is one or more of those described in Cox et al., Science. 2017, November 24; 358(6366): 1019-1027; Komore et al., Nature. 2016 May 19; 533(7603):420-4; and Gaudelli et al., Nature. 2017 Nov. 23; 551(7681):464-471.

[0159] In some cases, the deaminase may be a deaminase domain, e.g., a deaminase domain of ADAR (“ADAR-D”). In one example, the deaminase may be the deaminase domain of hADAR2 (“hADAR2-D), e.g., as described in Phelps K J et al., Recognition of duplex RNA by the deaminase domain of the RNA editing enzyme ADAR2. Nucleic Acids Res. 2015 January; 43(2):1123-32, which is incorporated by reference herein in its entirety. In a particular example, the hADAR2-D has a sequence comprising amino acid 299-701 of hADAR2, e.g., amino acid 299-701 of the sequence under Accession No. AF525422.1.

[0160] In certain examples, the system comprises a mutated form of an adenosine deaminase fused with a dead CRISPR-Cas or CRISPR-Cas nickase. The mutated form of the adenosine deaminase may have both adenosine deaminase and cytidine deaminase activities. In some embodiments, the adenosine deaminase may comprise one or more of the mutations: E488Q based on amino acid sequence positions of hADAR2, and mutations in a homologous ADAR protein corresponding to the above. In some embodiments, the adenosine deaminase may comprise one or more of the mutations: E488Q, V351G, based on amino acid sequence positions of hADAR2, and mutations in a homologous ADAR protein corresponding to the above. In some embodiments, the adenosine deaminase may comprise one or more of the mutations: E488Q, V351G, S486A, based on amino acid sequence positions of hADAR2, and mutations in a homologous ADAR protein corresponding to the above. In some embodiments, the adenosine deaminase may comprise one or more of the mutations: E488Q, V351G, S486A, T375S, based on amino acid sequence positions of hADAR2, and mutations in a homologous ADAR protein corresponding to the above. In some embodiments, the adenosine deaminase may comprise one or more of the mutations: E488Q, V351G, S486A, T375S, S370C, based on amino acid sequence positions of hADAR2, and mutations in a homologous ADAR protein corresponding to the above. In some embodiments, the adenosine deaminase may comprise one or more of the mutations: E488Q, V351G, S486A, T375S, S370C, P462A, based on amino acid sequence positions of hADAR2, and mutations in a homologous ADAR protein corresponding to the above. In some embodiments, the adenosine deaminase may comprise one or more of the mutations: E488Q, V351G, S486A, T375S, S370C, P462A, N597I, based on amino acid sequence positions of hADAR2, and mutations in a homologous ADAR protein corresponding to the above. In some embodiments, the adenosine deaminase may comprise one or more of the mutations: E488Q, V351G, S486A, T375S, S370C, P462A, N597I, L332I, based on amino acid sequence positions of hADAR2, and mutations in a homologous ADAR protein corresponding to the above. In some embodiments, the adenosine deaminase may comprise one or more of the mutations: E488Q, V351G, S486A, T375S, S370C, P462A, N597I, L332I, I398V, based on amino acid sequence positions of hADAR2-D, and mutations in a homologous ADAR protein corresponding to the above. In some embodiments, the adenosine deaminase may comprise one or more of the mutations: E488Q, V351G, S486A, T375S, S370C, P462A, N597I, L332I, I398V, K350I, based on amino acid sequence positions of hADAR2, and mutations in a homologous ADAR protein corresponding to the above. In some embodiments, the adenosine deaminase may comprise one or more of the mutations: E488Q, V351G, S486A, T375S, S370C, P462A, N597I, L332I, I398V, K350I, M383L, based on amino acid sequence positions of hADAR2, and mutations in a homologous ADAR protein corresponding to the above. In some embodiments, the adenosine deaminase may comprise one or more of the mutations: E488Q, V351G, S486A, T375S, S370C, P462A, N597I, L332I, I398V, K350I, M383L, D619G, based on amino acid sequence positions of hADAR2, and mutations in a homologous ADAR protein corresponding to the above. In some embodiments, the adenosine deaminase may comprise one or more of the mutations: E488Q, V351G, S486A, T375S, S370C, P462A, N597I, L332I, I398V, K350I, M383L, D619G, S582T, based on amino acid sequence positions of hADAR2, and mutations in a homologous ADAR protein corresponding to the above. In some embodiments, the adenosine deaminase may comprise one or more of the mutations: E488Q, V351G, S486A, T375S, S370C, P462A, N597I, L332I, I398V, K350I, M383L, D619G, S582T, V440I based on amino acid sequence positions of hADAR2, and mutations in a homologous ADAR protein corresponding to the above. In some embodiments, the adenosine deaminase may comprise one or more of the mutations: E488Q, V351G, S486A, T375S, S370C, P462A, N597I, L332I, I398V, K350I, M383L, D619G, S582T, V440I, S495N based on amino acid sequence positions of hADAR2, and mutations in a homologous ADAR protein corresponding to the above. In some embodiments, the adenosine deaminase may comprise one or more of the mutations: E488Q, V351G, S486A, T375S, S370C, P462A, N597I, L332I, I398V, K350I, M383L, D619G, S582T, V440I, S495N, K418E based on amino acid sequence positions of hADAR2, and mutations in a homologous ADAR protein corresponding to the above. In some embodiments, the adenosine deaminase may comprise one or more of the mutations: E488Q, V351G, S486A, T375S, S370C, P462A, N597I, L332I, I398V, K350I, M383L, D619G, S582T, V440I, S495N, K418E, S661T based on amino acid sequence positions of hADAR2, and mutations in a homologous ADAR protein corresponding to the above. In some examples, provided herein includes a mutated adenosine deaminase e.g., an adenosine deaminase comprising one or more mutations of E488Q, V351G, S486A, T375S, S370C, P462A, N597I, L332I, I398V, K350I, M383L, D619G, S582T, V440I, S495N, K418E, S661T based on amino acid sequence positions of hADAR2, and mutations in a homologous ADAR protein corresponding to the above, fused with a dead CRISPR-Cas protein or CRISPR-Cas nickase. In some examples, provided herein includes a mutated adenosine deaminase e.g., an adenosine deaminase comprising E488Q, V351G, S486A, T375S, S370C, P462A, N597I, L332I, I398V, K350I, M383L, D619G, S582T, V440I, S495N, K418E, and S661T based on amino acid sequence positions of hADAR2, and mutations in a homologous ADAR protein corresponding to the above, fused with a dead CRISPR-Cas protein or a CRISPR-Cas nickase. In some examples, provided herein includes a mutated adenosine deaminase e.g., an adenosine deaminase comprising E488Q, V351G, S486A, T375S, S370C, P462A, N597I, L332I, I398V, K350I, M383L, D619G, S582T, V440I, S495N, K418E, S661T, and S375N based on amino acid sequence positions of hADAR2, and mutations in a homologous ADAR protein corresponding to the above, fused with a dead CRISPR-Cas protein or a CRISPR-Cas nickase. In some examples, provided herein includes a mutated adenosine deaminase e.g., an adenosine deaminase comprising E488Q, V351G, S486A, T375S, S370C, P462A, N597I, L332I, I398V, K350I, M383L, D619G, S582T, V440I, S495N, K418E, S661T, and S375A based on amino acid sequence positions of hADAR2, and mutations in a homologous ADAR protein corresponding to the above, fused with a dead CRISPR-Cas protein or a CRISPR-Cas nickase.

[0161] In some examples, provided herein includes a mutated adenosine deaminase e.g., an adenosine deaminase comprising E488Q and E620G based on amino acid sequence positions of hADAR2, and mutations in a homologous ADAR protein corresponding to the above, fused with a dead CRISPR-Cas protein or a CRISPR-Cas nickase.

[0162] In some examples, provided herein includes a mutated adenosine deaminase e.g., an adenosine deaminase comprising E488Q and Q696L based on amino acid sequence positions of hADAR2, and mutations in a homologous ADAR protein corresponding to the above, fused with a dead CRISPR-Cas protein or a CRISPR-Cas nickase.

[0163] In some embodiments, the adenosine deaminase may be a tRNA-specific adenosine deaminase or a variant thereof. In some embodiments, the adenosine deaminase may comprise one or more of the mutations: W23L, W23R, R26G, H36L, N37S, P48S, P48T, P48A, I49V, R51L, N72D, L84F, S97C, A106V, D108N, H123Y, G125A, A142N, S146C, D147Y, R152H, R152P, E155V, I156F, K157N, K161T, based on amino acid sequence positions of E. coli TadA, and mutations in a homologous deaminase protein corresponding to the above. In some embodiments, the adenosine deaminase may comprise one or more of the mutations: D108N based on amino acid sequence positions of E. coli TadA, and mutations in a homologous deaminase protein corresponding to the above. In some embodiments, the adenosine deaminase may comprise one or more of the mutations: A106V, D108N, based on amino acid sequence positions of E. coli TadA, and mutations in a homologous deaminase protein corresponding to the above. In some embodiments, the adenosine deaminase may comprise one or more of the mutations: A106V, D108N, D147Y, E155V, based on amino acid sequence positions of E. coli TadA, and mutations in a homologous deaminase protein corresponding to the above. In some embodiments, the adenosine deaminase may comprise one or more of the mutations: A106V, D108N, based on amino acid sequence positions of E. coli TadA, and mutations in a homologous deaminase protein corresponding to the above. In some embodiments, the adenosine deaminase may comprise one or more of the mutations: A106V, D108N, D147Y, E155V, L84F, H123Y, I156F, based on amino acid sequence positions of E. coli TadA, and mutations in a homologous deaminase protein corresponding to the above. In some embodiments, the adenosine deaminase may comprise one or more of the mutations: A106V, D108N, D147Y, E155V, L84F, H123Y, I156F, A142N, based on amino acid sequence positions of E. coli TadA, and mutations in a homologous deaminase protein corresponding to the above. In some embodiments, the adenosine deaminase may comprise one or more of the mutations: A106V, D108N, D147Y, E155V, L84F, H123Y, I156F, H36L, R51L, S146C, K157N, based on amino acid sequence positions of E. coli TadA, and mutations in a homologous deaminase protein corresponding to the above. In some embodiments, the adenosine deaminase may comprise one or more of the mutations: A106V, D108N, D147Y, E155V, L84F, H123Y, I156F, H36L, R51L, S146C, K157N, P48S, based on amino acid sequence positions of E. coli TadA, and mutations in a homologous deaminase protein corresponding to the above. In some embodiments, the adenosine deaminase may comprise one or more of the mutations: A106V, D108N, D147Y, E155V, L84F, H123Y, I156F, H36L, R51L, S146C, K157N, P48S, A142N, based on amino acid sequence positions of E. coli TadA, and mutations in a homologous deaminase protein corresponding to the above. In some embodiments, the adenosine deaminase may comprise one or more of the mutations: A106V, D108N, D147Y, E155V, L84F, H123Y, I156F, H36L, R51L, S146C, K157N, P48S, W23R, P48A, based on amino acid sequence positions of E. coli TadA, and mutations in a homologous deaminase protein corresponding to the above. In some embodiments, the adenosine deaminase may comprise one or more of the mutations: A106V, D108N, D147Y, E155V, L84F, H123Y, I156F, H36L, R51L, S146C, K157N, P48S, W23R, P48A, A142N, based on amino acid sequence positions of E. coli TadA, and mutations in a homologous deaminase protein corresponding to the above. In some embodiments, the adenosine deaminase may comprise one or more of the mutations: A106V, D108N, D147Y, E155V, L84F, H123Y, I156F, H36L, R51L, S146C, K157N, P48S, W23R, P48A, R152P, based on amino acid sequence positions of E. coli TadA, and mutations in a homologous deaminase protein corresponding to the above. In some embodiments, the adenosine deaminase may comprise one or more of the mutations: A106V, D108N, D147Y, E155V, L84F, H123Y, I156F, H36L, R51L, S146C, K157N, P48S, W23R, P48A, R152P, A142N, based on amino acid sequence positions of E. coli TadA, and mutations in a homologous deaminase protein corresponding to the above.

[0164] In some examples, the base editing systems may comprise an intein-mediated trans-splicing system that enables in vivo delivery of a base editor, e.g., a split-intein cytidine base editor (CBE) or adenine base editor (ABE) engineered to trans-splice. Examples of such base editing systems include those described in Colin K. W. Lim et al., Treatment of a Mouse Model of ALS by In Vivo Base Editing, Mol Ther. 2020 Jan. 14. pii: S1525-0016(20)30011-3. doi: 10.1016/j.ymthe.2020.01.005; and Jonathan M. Levy et al., Cytosine and adenine base editing of the brain, liver, retina, heart and skeletal muscle of mice via adeno-associated viruses, Nature Biomedical Engineering volume 4, pages 97-110(2020), which are incorporated by reference herein in their entireties.

[0165] Certain mutations of APOBEC1 and APOBEC3 proteins have been described in Kim et al., Nature Biotechnology (2017) 35(4):371-377 (doi:10.1038/nbt.3803); and Harris et al. Mol. Cell (2002) 10:1247-1253, each of which is incorporated herein by reference in its entirety.

[0166] In some embodiments, the cytidine deaminase is an APOBEC1 deaminase comprising one or more mutations at amino acid positions corresponding to W90, R118, H121, H122, R126, or R132 in rat APOBEC1, or an APOBEC3G deaminase comprising one or more mutations at amino acid positions corresponding to W285, R313, D316, D317X, R320, or R326 in human APOBEC3G.

[0167] In some embodiments, the cytidine deaminase comprises a mutation at tryptophane⁹⁰ of the rat APOBEC1 amino acid sequence, or a corresponding position in a homologous APOBEC protein, such as tryptophane²¹⁵ of APOBEC3G. In some embodiments, the tryptophane residue at position 90 is replaced by an tyrosine or phenylalanine residue (W90Y or W90F).

[0168] In some embodiments, the cytidine deaminase comprises a mutation at Arginine¹¹⁸ of the rat APOBEC1 amino acid sequence, or a corresponding position in a homologous APOBEC protein. In some embodiments, the arginine residue at position 118 is replaced by an alanine residue (R118A).

[0169] In some embodiments, the cytidine deaminase comprises a mutation at Histidine¹²¹ of the rat APOBEC1 amino acid sequence, or a corresponding position in a homologous APOBEC protein. In some embodiments, the histidine residue at position 121 is replaced by an arginine residue (H121R).

[0170] In some embodiments, the cytidine deaminase comprises a mutation at Histidine¹²² of the rat APOBEC1 amino acid sequence, or a corresponding position in a homologous APOBEC protein. In some embodiments, the histidine residue at position 122 is replaced by an arginine residue (H122R).

[0171] In some embodiments, the deaminase is a cytidine deaminase. The term “cytidine deaminase” or “cytidine deaminase protein” as used herein refers to a protein, a polypeptide, or one or more functional domain(s) of a protein or a polypeptide that is capable of catalyzing a hydrolytic deamination reaction that converts an cytosine (or an cytosine moiety of a molecule) to an uracil (or a uracil moiety of a molecule), as shown below. In some embodiments, the cytosine-containing molecule is an cytidine (C), and the uracil-containing molecule is an uridine (U). The cytosine-containing molecule can be deoxyribonucleic acid (DNA) or ribonucleic acid (RNA).

[0172] In some embodiments, the cytidine deaminase comprises a mutation at Arginine¹²⁶ of the rat APOBEC1 amino acid sequence, or a corresponding position in a homologous APOBEC protein, such as Arginine³²⁰ of APOBEC3G. In some embodiments, the arginine residue at position 126 is replaced by an alanine residue (R126A) or by a glutamic acid (R126E).

[0173] In some embodiments, the cytidine deaminase comprises a mutation at arginine¹¹² of the APOBEC1 amino acid sequence, or a corresponding position in a homologous APOBEC protein. In some embodiments, the arginine residue at position 132 is replaced by a glutamic acid residue (R132E).

[0174] In some embodiments, to narrow the width of the editing window, the cytidine deaminase may comprise one or more of the mutations: W90Y, W90F, R126E and R132E, based on amino acid sequence positions of rat APOBEC1, and mutations in a homologous APOBEC protein corresponding to the above.

[0175] In some embodiments, to reduce editing efficiency, the cytidine deaminase may comprise one or more of the mutations: W90A, R118A, R132E, based on amino acid sequence positions of rat APOBEC1, and mutations in a homologous APOBEC protein corresponding to the above. In particular embodiments, it can be of interest to use a cytidine deaminase enzyme with reduced efficacy to reduce off-target effects.

[0176] In some embodiments, the cytidine deaminase is wild-type rat APOBEC1 (rAPOBEC1, or a catalytic domain thereof. In some embodiments, the cytidine deaminase comprises one or more mutations in the rAPOBEC1 sequence, such that the editing efficiency, and/or substrate editing preference of rAPOBEC1 is changed according to specific needs.

[0177] According to the present disclosure, cytidine deaminases that can be used in connection with the present disclosure include, but are not limited to, members of the enzyme family known as apolipoprotein B mRNA-editing complex (APOBEC) family deaminase, an activation-induced deaminase (AID), or a cytidine deaminase 1 (CDA1). In particular embodiments, the deaminase in an APOBEC1 deaminase, an APOBEC2 deaminase, an APOBEC3A deaminase, an APOBEC3B deaminase, an APOBEC3C deaminase, and APOBEC3D deaminase, an APOBEC3E deaminase, an APOBEC3F deaminase an APOBEC3G deaminase, an APOBEC3H deaminase, or an APOBEC4 deaminase.

[0178] In the methods and systems of the present invention, the cytidine deaminase is capable of targeting Cytosine in a DNA single strand. In certain example embodiments the cytodine deaminase may edit on a single strand present outside of the binding component e.g. bound Cas13. In other example embodiments, the cytodine deaminase may edit at a localized bubble, such as a localized bubble formed by a mismatch at the target edit site but the guide sequence. In certain example embodiments the cytodine deaminase may contain mutations that help focus the are of activity such as those disclosed in Kim et al., Nature Biotechnology (2017) 35(4):371-377 (doi:10.1038/nbt.3803.

[0179] In some embodiments, the cytidine deaminase is derived from one or more metazoa species, including but not limited to, mammals, birds, frogs, squids, fish, flies and worms. In some embodiments, the cytidine deaminase is a human, primate, cow, dog rat or mouse cytidine deaminase.

[0180] In some embodiments, the cytidine deaminase is a human APOBEC, including hAPOBEC1 or hAPOBEC3. In some embodiments, the cytidine deaminase is a human AID.

[0181] In some embodiments, the cytidine deaminase protein recognizes and converts one or more target cytosine residue(s) in a single-stranded bubble of a RNA duplex into uracil residues (s). In some embodiments, the cytidine deaminase protein recognizes a binding window on the single-stranded bubble of a RNA duplex. In some embodiments, the binding window contains at least one target cytosine residue(s). In some embodiments, the binding window is in the range of about 3 bp to about 100 bp. In some embodiments, the binding window is in the range of about 5 bp to about 50 bp. In some embodiments, the binding window is in the range of about 10 bp to about 30 bp. In some embodiments, the binding window is about 1 bp, 2 bp, 3 bp, 5 bp, 7 bp, 10 bp, 15 bp, 20 bp, 25 bp, 30 bp, 40 bp, 45 bp, 50 bp, 55 bp, 60 bp, 65 bp, 70 bp, 75 bp, 80 bp, 85 bp, 90 bp, 95 bp, or 100 bp.

[0182] In some embodiments, the cytidine deaminase protein comprises one or more deaminase domains. Not intended to be bound by theory, it is contemplated that the deaminase domain functions to recognize and convert one or more target cytosine (C) residue(s) contained in a single-stranded bubble of a RNA duplex into (an) uracil (U) residue (s). In some embodiments, the deaminase domain comprises an active center. In some embodiments, the active center comprises a zinc ion. In some embodiments, amino acid residues in or near the active center interact with one or more nucleotide(s) 5′ to a target cytosine residue. In some embodiments, amino acid residues in or near the active center interact with one or more nucleotide(s) 3′ to a target cytosine residue.

[0183] In some embodiments, the cytidine deaminase comprises human APOBEC1 full protein (hAPOBEC1) or the deaminase domain thereof (hAPOBEC1-D) or a C-terminally truncated version thereof (hAPOBEC-T). In some embodiments, the cytidine deaminase is an APOBEC family member that is homologous to hAPOBEC1, hAPOBEC-D or hAPOBEC-T. In some embodiments, the cytidine deaminase comprises human AID1 full protein (hAID) or the deaminase domain thereof (hAID-D) or a C-terminally truncated version thereof (hAID-T). In some embodiments, the cytidine deaminase is an AID family member that is homologous to hAID, hAID-D or hAID-T. In some embodiments, the hAID-T is a hAID which is C-terminally truncated by about 20 amino acids.

[0184] In some embodiments, the cytidine deaminase comprises the wild-type amino acid sequence of a cytosine deaminase. In some embodiments, the cytidine deaminase comprises one or more mutations in the cytosine deaminase sequence, such that the editing efficiency, and/or substrate editing preference of the cytosine deaminase is changed according to specific needs.

[0185] Certain mutations of APOBEC1 and APOBEC3 proteins have been described in Kim et al., Nature Biotechnology (2017) 35(4):371-377 (doi:10.1038/nbt.3803); and Harris et al. Mol. Cell (2002) 10:1247-1253, each of which is incorporated herein by reference in its entirety.

[0186] In some embodiments, the cytidine deaminase is an APOBEC1 deaminase comprising one or more mutations at amino acid positions corresponding to W90, R118, H121, H122, R126, or R132 in rat APOBEC1, or an APOBEC3G deaminase comprising one or more mutations at amino acid positions corresponding to W285, R313, D316, D317X, R320, or R326 in human APOBEC3G.

[0187] In some embodiments, the cytidine deaminase comprises a mutation at tryptophane⁹⁰ of the rat APOBEC1 amino acid sequence, or a corresponding position in a homologous APOBEC protein, such as tryptophane²¹⁵ of APOBEC3G. In some embodiments, the tryptophane residue at position 90 is replaced by an tyrosine or phenylalanine residue (W90Y or W90F).

[0188] In some embodiments, the cytidine deaminase comprises a mutation at Arginine¹¹⁸ of the rat APOBEC1 amino acid sequence, or a corresponding position in a homologous APOBEC protein. In some embodiments, the arginine residue at position 118 is replaced by an alanine residue (R118A).

[0189] In some embodiments, the cytidine deaminase comprises a mutation at Histidine¹²¹ of the rat APOBEC1 amino acid sequence, or a corresponding position in a homologous APOBEC protein. In some embodiments, the histidine residue at position 121 is replaced by an arginine residue (H121R).

[0190] In some embodiments, the cytidine deaminase comprises a mutation at Histidine¹²² of the rat APOBEC1 amino acid sequence, or a corresponding position in a homologous APOBEC protein. In some embodiments, the histidine residue at position 122 is replaced by an arginine residue (H122R).

[0191] In some embodiments, the cytidine deaminase comprises a mutation at Arginine¹²⁶ of the rat APOBEC1 amino acid sequence, or a corresponding position in a homologous APOBEC protein, such as Arginine³²⁰ of APOBEC3G. In some embodiments, the arginine residue at position 126 is replaced by an alanine residue (R126A) or by a glutamic acid (R126E).

[0192] In some embodiments, the cytidine deaminase comprises a mutation at arginine¹³² of the APOBEC1 amino acid sequence, or a corresponding position in a homologous APOBEC protein. In some embodiments, the arginine residue at position 132 is replaced by a glutamic acid residue (R132E).

[0193] In some embodiments, to narrow the width of the editing window, the cytidine deaminase may comprise one or more of the mutations: W90Y, W90F, R126E and R132E, based on amino acid sequence positions of rat APOBEC1, and mutations in a homologous APOBEC protein corresponding to the above.

[0194] In some embodiments, to reduce editing efficiency, the cytidine deaminase may comprise one or more of the mutations: W90A, R118A, R132E, based on amino acid sequence positions of rat APOBEC1, and mutations in a homologous APOBEC protein corresponding to the above. In particular embodiments, it can be of interest to use a cytidine deaminase enzyme with reduced efficacy to reduce off-target effects.

[0195] In some embodiments, the cytidine deaminase is wild-type rat APOBEC1 (rAPOBEC1, or a catalytic domain thereof. In some embodiments, the cytidine deaminase comprises one or more mutations in the rAPOBEC1 sequence, such that the editing efficiency, and/or substrate editing preference of rAPOBEC1 is changed according to specific needs.

[0196] In some embodiments, the cytidine deaminase is wild-type human APOBEC3G (hAPOBEC3G) or a catalytic domain thereof. In some embodiments, the cytidine deaminase comprises one or more mutations in the hAPOBEC3G sequence, such that the editing efficiency, and/or substrate editing preference of hAPOBEC3G is changed according to specific needs.

[0197] In some embodiments, the cytidine deaminase is wild-type human APOBEC1 (hAPOBEC1) or a catalytic domain thereof. In some embodiments, the cytidine deaminase comprises one or more mutations in the hAPOBEC1 sequence, such that the editing efficiency, and/or substrate editing preference of hAPOBEC1 is changed according to specific needs.

[0198] In some embodiments, the cytidine deaminase is wild-type Petromyzon marinus CDA1 (pmCDAl) or a catalytic domain thereof. In some embodiments, the cytidine deaminase comprises one or more mutations in the pmCDAl sequence, such that the editing efficiency, and/or substrate editing preference of pmCDAl is changed according to specific needs. In some embodiments, the cytidine deaminase is wild-type human AID (hAID) or a catalytic domain thereof. In some embodiments, the cytidine deaminase comprises one or more mutations in the pmCDAl sequence, such that the editing efficiency, and/or substrate editing preference of pmCDAl is changed according to specific needs.

[0199] Reference polypeptide sequences for APOBEC1, rAPOBEC1, hAPOBEC3G, pmCDAl, hAID, can be found in e.g. International Application Publication WO 2019126774.

[0200] Additional embodiments of the cytidine deaminase are disclosed in WO WO2017/070632, titled “Nucleobase Editor and Uses Thereof,” which is incorporated herein by reference in its entirety.

[0201] In some embodiments, mutations to the cytidine deaminase affect the editing window width. In some embodiments, the cytidine deaminase component of the CD-functionalized CRISPR system comprises one or more mutations that reduce the catalytic efficiency of the cytidine deaminase, such that the deaminase is prevented from deamination of multiple cytidines per DNA binding event. In some embodiments, tryptophan at residue 90 (W90) of APOBEC1 or a corresponding tryptophan residue in a homologous sequence is mutated. A catalytically inactive Type II-D Cas can be fused to or linked to an APOBEC1 mutant that comprises a W90Y or W90F mutation. In some embodiments, tryptophan at residue 285 (W285) of APOBEC3G, or a corresponding tryptophan residue in a homologous sequence (is mutated. In some embodiments, the catalytically inactive Type II-D is fused to or linked to an APOBEC3G mutant that comprises a W285Y or W285F mutation.

[0202] In some embodiments, the cytidine deaminase component of CD-functionalized CRISPR system comprises one or more mutations that reduce tolerance for non-optimal presentation of a cytidine to the deaminase active site. In some embodiments, the cytidine deaminase comprises one or more mutations that alter substrate binding activity of the deaminase active site. In some embodiments, the cytidine deaminase comprises one or more mutations that alter the conformation of DNA to be recognized and bound by the deaminase active site. In some embodiments, the cytidine deaminase comprises one or more mutations that alter the substrate accessibility to the deaminase active site. In some embodiments, arginine at residue 126 (R126) of APOBEC1 or a corresponding arginine residue in a homologous sequence is mutated. In some embodiments, the catalytically inactive Type II-D Cas is fused to or linked to an APOBEC1 that comprises a R126A or R126E mutation. In some embodiments, arginine at residue 132 (R132) of APOBEC1 or a corresponding arginine residue in a homologous sequence is mutated. In some embodiments, the catalytically inactive Type II-D Cas is fused to or linked to an APOBEC1 mutant that comprises a R132E mutation.

[0203] In some embodiments, the APOBEC1 domain of the CD-functionalized CRISPR system comprises one, two, or three mutations selected from W90Y, W90F, R126A, R126E, and R132E. In some embodiments, the APOBEC1 domain comprises double mutations of W90Y and R126E. In some embodiments, the APOBEC1 domain comprises double mutations of W90Y and R132E. In some embodiments, the APOBEC1 domain comprises double mutations of R126E and R132E. In some embodiments, the APOBEC1 domain comprises three mutations of W90Y, R126E and R132E.

[0204] In some embodiments, one or more mutations in the cytidine deaminase as disclosed herein reduce the editing window width to about 2 nucleotides. In some embodiments, one or more mutations in the cytidine deaminase as disclosed herein reduce the editing window width to about 1 nucleotide. In some embodiments, one or more mutations in the cytidine deaminase as disclosed herein reduce the editing window width while only minimally or modestly affecting the editing efficiency of the enzyme. In some embodiments, one or more mutations in the cytidine deaminase as disclosed herein reduce the editing window width without reducing the editing efficiency of the enzyme. In some embodiments, one or more mutations in the cytidine deaminase as disclosed herein enable discrimination of neighboring cytidine nucleotides, which would be otherwise edited with similar efficiency by the cytidine deaminase

[0205] Examples of base editing systems include those described in International Patent Publication Nos. WO 2019/071048 (e.g., paragraphs [0933]-[0938]), WO 2019/084063 (e.g., paragraphs [0173]-[0186], [0323]-[0475], [0893]-[1094]), WO 2019/126716 (e.g., paragraphs [0290]-[0425], [1077]-[1084]), WO 2019/126709 (e.g., paragraphs [0294]-[0453]), WO 2019/126762 (e.g., paragraphs [0309]-[0438]), WO 2019/126774 (e.g., paragraphs [0511]-[0670]), WO 20170710632 (e.g. paragraphs [0604]-[0605] et seq.), Cox D B T, et al., RNA editing with CRISPR-Cas13, Science. 2017 Nov. 24; 358(6366):1019-1027; Abudayyeh 00, et al., A cytosine deaminase for programmable single-base RNA editing, Science 26 Jul. 2019: Vol. 365, Issue 6451, pp. 382-386; Gaudelli N M et al., Programmable base editing of A•T to G•C in genomic DNA without DNA cleavage, Nature volume 551, pages 464-471 (23 Nov. 2017); Komor A C, et al., Programmable editing of a target base in genomic DNA without double-stranded DNA cleavage. Nature. 2016 May 19; 533(7603):420-4; Jordan L. Doman et al., Evaluation and minimization of Cas9-independent off-target DNA editing by cytosine base editors, Nat Biotechnol (2020). doi.org/10.1038/s41587-020-0414-6; and Richter M F et al., Phage-assisted evolution of an adenine base editor with improved Cas domain compatibility and activity, Nat Biotechnol (2020). doi.org/10.1038/s41587-020-0453-z, which are incorporated by reference herein in their entireties.

[0206] Additional CRISPR-Cas systems suitable for DNA and/or RNA base editing have been described in e.g., any of which can be adapted according to the present disclosure herein, such as to include a small Type II-D Cas protein or variant described in greater detail elsewhere herein.

[0207] In certain example embodiments, the nucleotide deaminase may be a DNA base editor used in combination with a DNA binding Cas protein such as, but not limited to, Class 2 Type II and Type V systems. Two classes of DNA base editors are generally known: cytosine base editors (CBEs) and adenine base editors (ABEs). CBEs convert a C•G base pair into a T•A base pair (Komor et al. 2016. Nature. 533:420-424; Nishida et al. 2016. Science. 353; and Li et al. Nat. Biotech. 36:324-327) and ABEs convert an A•T base pair to a G•C base pair. Collectively, CBEs and ABEs can mediate all four possible transition mutations (C to T, A to G, T to C, and G to A). Rees and Liu. 2018. Nat. Rev. Genet. 19(12): 770-788, particularly at FIGS. 1b, 2a-2c, 3a-3f, and Table 1. In some embodiments, the base editing system includes a CBE and/or an ABE. In some embodiments, a polynucleotide of the present invention described elsewhere herein can be modified using a base editing system. Rees and Liu. 2018. Nat. Rev. Gent. 19(12):770-788. Base editors also generally do not need a DNA donor template and/or rely on homology-directed repair. Komor et al. 2016. Nature. 533:420-424; Nishida et al. 2016. Science. 353; and Gaudeli et al. 2017. Nature. 551:464-471. Upon binding to a target locus in the DNA, base pairing between the guide RNA of the system and the target DNA strand leads to displacement of a small segment of ssDNA in an “R-loop”. Nishimasu et al. Cell. 156:935-949. DNA bases within the ssDNA bubble are modified by the enzyme component, such as a deaminase. In some systems, the catalytically disabled Cas protein can be a variant or modified Cas can have nickase functionality and can generate a nick in the non-edited DNA strand to induce cells to repair the non-edited strand using the edited strand as a template. Komor et al. 2016. Nature. 533:420-424; Nishida et al. 2016. Science. 353; and Gaudeli et al. 2017. Nature. 551:464-471.

[0208] Other Example Type V base editing systems are described in International Patent Publication Nos. WO 2018/213708, WO 2018/213726, and International Patent Applications No. PCT/US2018/067207, PCT/US2018/067225, and PCT/US2018/067307, each of which is incorporated herein by reference and can be adapted for use with and in view of embodiments of the present disclosure.

[0209] In certain example embodiments, the base editing system may be an RNA base editing system. As with DNA base editors, a nucleotide deaminase capable of converting nucleotide bases may be fused to a Cas protein, such as a Type II-D Cas. In the context of an RNA base editing system, the Cas protein is a Type II-D Cas, derivative thereof, or variant thereof that is capable of binding RNA. Other example RNA binding Cas proteins include, but are not limited to, RNA-binding Cas9s such as Francisella novicida Cas9 (“FnCas9”), and Class 2 Type VI Cas systems. The nucleotide deaminase may be a cytidine deaminase or an adenosine deaminase, or an adenosine deaminase engineered to have cytidine deaminase activity. In certain example embodiments, the RNA base editor may be used to delete or introduce a post-translation modification site in the expressed mRNA. In contrast to DNA base editors, whose edits are permanent in the modified cell, RNA base editors can provide edits where finer, temporal control may be needed, for example in modulating a particular immune response. Example Type VI RNA-base editing systems are described in Cox et al. 2017. Science 358: 1019-1027, International Patent Publication Nos. WO 2019/005884, WO 2019/005886, and WO 2019/071048, and International Patent Application Nos. PCT/US20018/05179 and PCT/US2018/067207, which are incorporated herein by reference. An example FnCas9 system that may be adapted for RNA base editing utilizing a Type II-D Cas is described in International Patent Publication No. WO 2016/106236, which is incorporated herein by reference.

[0210] An example method for delivery of base-editing systems, including use of a split-intein approach to divide CBE and ABE into reconstitutable halves, is described in Levy et al. Nature Biomedical Engineering doi.org/10.1038/s41441-019-0505-5 (2019), which is incorporated herein by reference and can be adapted for use with and in view of embodiments of the present disclosure.

[0211] Additional base editing systems that can be adapted for use with and in view of embodiments of the present disclosure are any of those described in, for example, Rees et al., Nat. Rev. Genet. 19, 770-788. (2018); Lee et al., Nat. Commun. 9: 4804. 1-5 (2018); Song et al., Biomed. Eng. 36, 536-539 (2018); Lee et al., Sci. Rep. 9, 1662 (2019); Thuronyi et al., Nat. Biotechnol. 37, 1070-1079 (2019); Anzalone et al., Nature, 576, 149-157 (2019); Richter et al., Nat. Biotechnol. 38: 883-891 (2020); Abudayyeh et al., Science 365, 6451, pp. 382-386; DOI: 10.1126/science.aax7063; WO 2019/005884; WO 2019/005886; WO 2019/060746; WO 2019/071048; WO 2019/084063; WO 2020/028555, which are all herein incorporated by reference as if expressed in their entireties.

[0212] In some embodiments, a polynucleotide of the present invention described elsewhere herein can be modified using a base editing system.

### Prime Editors

[0213] In some embodiments, the CRISPR-Cas system is capable of prime editing and thus is a prime editing system. In some embodiments, the prime editing system includes a small Type II-D Cas protein or variant described in greater detail elsewhere herein. In some embodiments, the prime editing system is used in a method to modify a polynucleotide. See e.g., Anzalone et al. 2019. Nature. 576: 149-157. Like base editing systems, prime editing systems can be capable of targeted modification of a polynucleotide without generating double stranded breaks and does not require donor templates. Further prime editing systems can be capable of all 12 possible combination swaps. Prime editing can operate via a “search-and-replace” methodology and can mediate targeted insertions, deletions, all 12 possible base-to-base conversion and combinations thereof. Generally, a prime editing system, as exemplified by PE1, PE2, and PE3 (Id.), can include a reverse transcriptase fused or otherwise coupled or associated with an RNA-programmable nickase and a prime-editing extended guide RNA (pegRNA) to facility direct copying of genetic information from the extension on the pegRNA into the target polynucleotide. Embodiments that can be used with the present invention include these and variants thereof. Prime editing can have the advantage of lower off-target activity than traditional CRIPSR-Cas systems along with few byproducts and greater or similar efficiency as compared to traditional CRISPR-Cas systems.

[0214] In some embodiments, the prime editing guide molecule can specify both the target polynucleotide information (e.g., sequence) and contain a new polynucleotide cargo that replaces target polynucleotides. To initiate transfer from the guide molecule to the target polynucleotide, the PE system can nick the target polynucleotide at a target side to expose a 3′hydroxyl group, which can prime reverse transcription of an edit-encoding extension region of the guide molecule (e.g., a prime editing guide molecule or peg guide molecule) directly into the target site in the target polynucleotide. See e.g., Anzalone et al. 2019. Nature. 576: 149-157, particularly at FIGS. 1b, 1c, related discussion, and Supplementary discussion.

[0215] In some embodiments, a prime editing system can be composed of a Cas polypeptide having nickase activity, a reverse transcriptase, and a guide molecule. The Cas polypeptide can lack nuclease activity. The guide molecule can include a target binding sequence as well as a primer binding sequence and a template containing the edited polynucleotide sequence. The guide molecule, Cas polypeptide, and/or reverse transcriptase can be coupled together or otherwise associate with each other to form an effector complex and edit a target sequence. In some embodiments, the Cas polypeptide is a Class 2, Type V Cas polypeptide. In some embodiments, the Cas polypeptide is a Type II-D Cas polypeptide (e.g., is a Type II-D Cas nickase). In some embodiments, the Cas polypeptide is fused to the reverse transcriptase. In some embodiments, the Cas polypeptide is linked to the reverse transcriptase. In some embodiments the Cas polypeptide is a small Type II-D Cas protein or variant thereof.

[0216] In some embodiments, the prime editing system can be a PE1 system or variant thereof, a PE2 system or variant thereof, or a PE3 (e.g. PE3, PE3b) system. See e.g., Anzalone et al. 2019. Nature. 576: 149-157, particularly at pgs. 2-3, FIGS. 2a, 3a-3f, 4a-4b, Extended data FIGS. 3a-3b, 4.

[0217] The peg guide molecule can be about 10 to about 200 or more nucleotides in length, such as 10 to/or 11, 12, 13, 14, 15, 16, 17, 18, 19, 20, 21, 22, 23, 24, 25, 26, 27, 28, 29, 30, 31, 32, 33, 34, 35, 36, 37, 38, 39, 40, 41, 42, 43, 44, 45, 46, 47, 48, 49, 50, 51, 52, 53, 54, 55, 56, 57, 58, 59, 60, 61, 62, 63, 64, 65, 66, 67, 68, 69, 70, 71, 72, 73, 74, 75, 76, 77, 78, 79, 80, 81, 82, 83, 84, 85, 86, 87, 88, 89, 90, 91, 92, 93, 94, 95, 96, 97, 98, 99, 100, 101, 102, 103, 104, 105, 106, 107, 108, 109, 110, 111, 112, 113, 114, 115, 116, 117, 118, 119, 120, 121, 122, 123, 124, 125, 126, 127, 128, 129, 130, 131, 132, 133, 134, 135, 136, 137, 138, 139, 140, 141, 142, 143, 144, 145, 146, 147, 148, 149, 150, 151, 152, 153, 154, 155, 156, 157, 158, 159, 160, 161, 162, 163, 164, 165, 166, 167, 168, 169, 170, 171, 172, 173, 174, 175, 176, 177, 178, 179, 180, 181, 182, 183, 184, 185, 186, 187, 188, 189, 190, 191, 192, 193, 194, 195, 196, 197, 198, 199, or 200 or more nucleotides in length. Optimization of the peg guide molecule can be accomplished as described in Anzalone et al. 2019. Nature. 576: 149-157, particularly at pg. 3, FIG. 2a-2b, and Extended Data FIGS. 5a-c.

### Cas Variants

[0218] The Cas proteins herein include variants and mutated forms of Cas proteins (comparing to wildtype or naturally occurring Cas proteins, including, but not limited to, the small Type II-D Cas proteins described in greater detail elsewhere herein). In some embodiments, one or more Cas proteins in the CRISPR-Cas system described herein (including but not limited to the small Type II-D Cas protein(s)) is a Cas variant. In some examples, the present disclosure includes variants and mutated forms of the Cas proteins. It is to be understood that mutated Cas has an altered or modified catalytic activity if the catalytic activity is different than the catalytic activity of the corresponding wild type Cas protein (e.g., unmutated Cas protein). Catalytic activity can be determined by means known in the art. By means of example, and without limitation, catalytic activity can be determined in vitro or in vivo by determination of indel percentage (for instance after a given time, or at a given dose). In certain embodiments, the catalytic activity of the Cas protein (e.g., the small Type II-D Cas protein(s)) of the invention is altered or modified. The variants or mutated forms of Cas protein may be catalytically inactive, e.g., have no or reduced nuclease activity compared to a corresponding wildtype. In certain examples, the variants or mutated forms of Cas protein have nickase activity. In some embodiments, the catalytic activity of the Cas protein is increased.

[0219] In certain embodiments, catalytic activity is increased. In certain embodiments, catalytic activity is increased by at least 5%, preferably at least 10%, more preferably at least 20%, such as at least 30%, at least 40%, at least 50%, at least 60%, at least 70%, at least 80%, at least 90%, or at least 100%. In certain embodiments, catalytic activity is decreased. In certain embodiments, catalytic activity is decreased by at least 5%, preferably at least 10%, more preferably at least 20%, such as at least 30%, at least 40%, at least 50%, at least 60%, at least 70%, at least 80%, at least 90%, or (substantially) 100%. The one or more mutations herein may inactivate the catalytic activity, which may substantially all catalytic activity, below detectable levels, or no measurable catalytic activity.

[0220] In some embodiments, one or more characteristics of a Cas variant protein may be different from a corresponding wiled type Cas protein. Examples of such characteristics include catalytic activity, gRNA binding, specificity of the Cas protein (e.g., specificity of editing a defined target), stability of the Cas protein, off-target binding, target binding, protease activity, nickase activity, PFS recognition, or a combination thereof.

[0221] In some embodiments, the gRNA binding of the engineered Cas protein is increased as compared to a corresponding wildtype Cas protein. In some embodiments, the gRNA binding of the engineered Cas protein is decreased as compared to a corresponding wildtype Cas protein. In some embodiments, the specificity of the Cas protein is increased as compared to a corresponding wildtype Cas protein. In some embodiments, the specificity of the Cas protein is decreased as compared to a corresponding wildtype Cas protein. In some embodiments, the stability of the Cas protein is increased as compared to a corresponding wildtype Cas protein. In some embodiments, the stability of the Cas protein is decreased as compared to a corresponding wildtype Cas protein. In some embodiments, the engineered Cas protein further comprises one or more mutations which inactivate catalytic activity. In some embodiments, the off-target binding of the Cas protein is increased as compared to a corresponding wildtype Cas protein. In some embodiments, the off-target binding of the Cas protein is decreased as compared to a corresponding wildtype Cas protein. In some embodiments, the target binding of the Cas protein is increased as compared to a corresponding wildtype Cas protein. In some embodiments, the target binding of the Cas protein is decreased as compared to a corresponding wildtype Cas protein. In some embodiments, the engineered Cas protein has a higher protease activity or polynucleotide-binding capability compared with a corresponding wildtype Cas protein. In some embodiments, the PFS recognition is altered as compared to a corresponding wildtype Cas protein.

[0222] In certain embodiments, the gRNA (crRNA) binding of the Cas protein of the invention is altered or modified. It is to be understood that mutated Cas has an altered or modified gRNA binding if the gRNA binding is different than the gRNA binding of the corresponding wild type Cas (i.e., unmutated Cas). gRNA binding can be determined by means known in the art. By means of example, and without limitation, gRNA binding can be determined by calculating binding strength or affinity (such as based on equilibrium constants, Ka, Kd, etc.). In certain embodiments, gRNA binding is increased. In certain embodiments, gRNA binding is increased by at least 5%, preferably at least 10%, more preferably at least 20%, such as at least 30%, at least 40%, at least 50%, at least 60%, at least 70%, at least 80%, at least 90%, or at least 100%. In certain embodiments, gRNA binding is decreased. In certain embodiments, gRNA binding is decreased by at least 5%, preferably at least 10%, more preferably at least 20%, such as at least 30%, at least 40%, at least 50%, at least 60%, at least 70%, at least 80%, at least 90%, or (substantially) 100%.

[0223] In certain embodiments, the specificity of the Cas protein of the invention is altered or modified. It is to be understood that mutated Cas has an altered or modified specificity if the specificity is different than the specificity of the corresponding wild type Cas (i.e. unmutated Cas). Specificity can be determined by means known in the art. By means of example, and without limitation, specificity can be determined by comparison of on-target activity and off-target activity. In certain embodiments, specificity is increased. In certain embodiments, specificity is increased by at least 5%, preferably at least 10%, more preferably at least 20%, such as at least 30%, at least 40%, at least 50%, at least 60%, at least 70%, at least 80%, at least 90%, or at least 100%. In certain embodiments, specificity is decreased. In certain embodiments, specificity is decreased by at least 5%, preferably at least 10%, more preferably at least 20%, such as at least 30%, at least 40%, at least 50%, at least 60%, at least 70%, at least 80%, at least 90%, or (substantially) 100%.

[0224] In certain embodiments, the stability of the Cas protein of the invention is altered or modified. It is to be understood that mutated Cas has an altered or modified stability if the stability is different than the stability of the corresponding wild type Cas (i.e. unmutated Cas). Stability can be determined by means known in the art. By means of example, and without limitation, stability can be determined by determining the half-life of the Cas protein. In certain embodiments, stability is increased. In certain embodiments, stability is increased by at least 5%, preferably at least 10%, more preferably at least 20%, such as at least 30%, at least 40%, at least 50%, at least 60%, at least 70%, at least 80%, at least 90%, or at least 100%. In certain embodiments, stability is decreased. In certain embodiments, stability is decreased by at least 5%, preferably at least 10%, more preferably at least 20%, such as at least 30%, at least 40%, at least 50%, at least 60%, at least 70%, at least 80%, at least 90%, or (substantially) 100%.

[0225] In certain embodiments, the target binding of the Cas protein of the invention is altered or modified. It is to be understood that mutated Cas has an altered or modified target binding if the target binding is different than the target binding of the corresponding wild type Cas (i.e. unmutated Cas). target binding can be determined by means known in the art. By means of example, and without limitation, target binding can be determined by calculating binding strength or affinity (such as based on equilibrium constants, Ka, Kd, etc.). In certain embodiments, target bindings increased. In certain embodiments, target binding is increased by at least 5%, preferably at least 10%, more preferably at least 20%, such as at least 30%, at least 40%, at least 50%, at least 60%, at least 70%, at least 80%, at least 90%, or at least 100%. In certain embodiments, target binding is decreased. In certain embodiments, target binding is decreased by at least 5%, preferably at least 10%, more preferably at least 20%, such as at least 30%, at least 40%, at least 50%, at least 60%, at least 70%, at least 80%, at least 90%, or (substantially) 100%.

[0226] In certain embodiments, the off-target binding of the Cas protein of the invention is altered or modified. It is to be understood that mutated Cas has an altered or modified off-target binding if the off-target binding is different than the off-target binding of the corresponding wild type Cas (i.e., unmutated Cas). Off-target binding can be determined by means known in the art. By means of example, and without limitation, off-target binding can be determined by calculating binding strength or affinity (such as based on equilibrium constants, Ka, Kd, etc.). In certain embodiments, off-target bindings increased. In certain embodiments, off-target binding is increased by at least 5%, preferably at least 10%, more preferably at least 20%, such as at least 30%, at least 40%, at least 50%, at least 60%, at least 70%, at least 80%, at least 90%, or at least 100%. In certain embodiments, off-target binding is decreased. In certain embodiments, off-target binding is decreased by at least 5%, preferably at least 10%, more preferably at least 20%, such as at least 30%, at least 40%, at least 50%, at least 60%, at least 70%, at least 80%, at least 90%, or (substantially) 100%.

[0227] In certain embodiments, the PFS (or PAM) recognition or specificity of the Cas protein of the invention is altered or modified. It is to be understood that mutated Cas has an altered or modified PFS recognition or specificity if the PFS recognition or specificity is different than the PFS recognition or specificity of the corresponding wild type Cas (i.e., unmutated Cas). PFS recognition or specificity can be determined by means known in the art. By means of example, and without limitation, PFS recognition or specificity can be determined by PFS (PAM) screens. In certain embodiments, at least one different PFS is recognized by the Cas. In certain embodiments, at least one PFS is recognized by the mutated Cas which is not recognized by the corresponding wild type Cas. In certain embodiments, at least one PFS is recognized by the mutated Cas which is not recognized by the corresponding wild type Cas, in addition to the wild type PFS. In certain embodiments, at least one PFS is recognized by the mutated Cas which is not recognized by the corresponding wild type Cas, and the wild type PFS is not anymore recognized. In certain embodiments, the PFS recognized by the mutated Cas is longer than the PFS recognized by the wild type Cas, such as 1, 2, or 3 nucleotides longer. In certain embodiments, the PFS recognized by the mutated Cas is shorter than the PFS recognized by the wild type Cas, such as 1, 2, or 3 nucleotides shorter.

[0228] In some cases, the present disclosure provides for mutated Cas proteins comprising one or more modified of amino acids. The amino acids: (a) interact with a guide RNA that forms a complex with the mutated Cas protein; (b) are in an active site, an inter-domain linker domain, or a bridge helix domain of the mutated Cas protein; or (c) a combination thereof.

[0229] The term “corresponding amino acid” or “residue which corresponds to” refers to a particular amino acid or analogue thereof in a Cas homolog or ortholog that is identical or functionally equivalent to an amino acid in reference Cas protein. Accordingly, as used herein, referral to an “amino acid position corresponding to amino acid position [X]” of a specified Cas protein represents referral to a collection of equivalent positions in other recognized Cas and structural homologues and families.

[0230] Exemplary variant Cas proteins are described below, but others are also described elsewhere herein, such as those containing accessory molecules or other functional domains.

### Structural (Sub)Domains

[0231] Also described herein are embodiments of a mutated Cas protein containing one or more mutations of amino acids, wherein the amino acids: interact with a guide RNA that forms a complex with the engineered Cas protein; or are in an active site, e.g., in RuvC and/or HNH domains.

[0232] The types of mutations can be conservative mutations or non-conservative mutations. In certain preferred embodiments, the amino acid which is mutated is mutated into alanine (A). In certain preferred embodiments, if the amino acid to be mutated is an aromatic amino acid, it is mutated into alanine or another aromatic amino acid (e.g., H, Y, W, or F). In certain preferred embodiments, if the amino acid to be mutated is a charged amino acid, it is mutated into alanine or another charged amino acid (e.g., H, K, R, D, or E). In certain preferred embodiments, if the amino acid to be mutated is a charged amino acid, it is mutated into alanine or another charged amino acid having the same charge. In certain preferred embodiments, if the amino acid to be mutated is a charged amino acid, it is mutated into alanine or another charged amino acid having the opposite charge.

[0233] The invention also provides for methods and compositions wherein one or more amino acid residues of the effector protein may be modified e.g., an engineered or non-naturally-occurring effector protein or Cas. In an embodiment, the modification may comprise mutation of one or more amino acid residues of the effector protein. The one or more mutations may be in one or more catalytically active domains of the effector protein, or a domain interacting with the crRNA (such as the guide sequence or direct repeat sequence). The effector protein may have reduced, or abolished nuclease activity or alternatively increased nuclease activity compared with an effector protein lacking said one or more mutations. The effector protein may not direct cleavage of the RNA strand at the target locus of interest. In a preferred embodiment, the one or more mutations may comprise two mutations.

[0234] The Cas protein herein may comprise one or more amino acids mutated. In some embodiments, the amino acid is mutated to A, P, or V, preferably A. In some embodiments, the amino acid is mutated to a hydrophobic amino acid. In some embodiments, the amino acid is mutated to an aromatic amino acid. In some embodiments, the amino acid is mutated to a charged amino acid. In some embodiments, the amino acid is mutated to a positively charged amino acid. In some embodiments, the amino acid is mutated to a negatively charged amino acid. In some embodiments, the amino acid is mutated to a polar amino acid. In some embodiments, the amino acid is mutated to an aliphatic amino acid.

### Destabilized Cas and Fusion Proteins

[0235] In certain embodiments, the Cas protein according to the invention as described herein is associated with or fused to a destabilization domain (DD). In some embodiments, the DD is ER50. A corresponding stabilizing ligand for this DD is, in some embodiments, 4HT. As such, in some embodiments, one of the at least one DDs is ER50 and a stabilizing ligand therefor is 4HT or CMP8. In some embodiments, the DD is DHFR50. A corresponding stabilizing ligand for this DD is, in some embodiments, TMP. As such, in some embodiments, one of the at least one DDs is DHFR50 and a stabilizing ligand therefor is TMP. In some embodiments, the DD is ER50. A corresponding stabilizing ligand for this DD is, in some embodiments, CMP8. CMP8 may therefore be an alternative stabilizing ligand to 4HT in the ER50 system. While it may be possible that CMP8 and 4HT can/should be used in a competitive matter, some cell types may be more susceptible to one or the other of these two ligands, and from this disclosure and the knowledge in the art the skilled person can use CMP8 and/or 4HT.

[0236] In some embodiments, one or two DDs may be fused to the N-terminal end of the Cas with one or two DDs fused to the C-terminal of the Cas. In some embodiments, the at least two DDs are associated with the Cas and the DDs are the same DD, i.e., the DDs are homologous. Thus, both (or two or more) of the DDs could be ER50 DDs. This is preferred in some embodiments. Alternatively, both (or two or more) of the DDs could be DHFR50 DDs. This is also preferred in some embodiments. In some embodiments, the at least two DDs are associated with the Cas and the DDs are different DDs, i.e., the DDs are heterologous. Thus, one of the DDS could be ER50 while one or more of the DDs or any other DDs could be DHFR50. Having two or more DDs which are heterologous may be advantageous as it would provide a greater level of degradation control. A tandem fusion of more than one DD at the N or C-term may enhance degradation; and such a tandem fusion can be, for example ER50-ER50-Cas or DHFR-DHFR-Cas It is envisaged that high levels of degradation would occur in the absence of either stabilizing ligand, intermediate levels of degradation would occur in the absence of one stabilizing ligand and the presence of the other (or another) stabilizing ligand, while low levels of degradation would occur in the presence of both (or two of more) of the stabilizing ligands. Control may also be imparted by having an N-terminal ER50 DD and a C-terminal DHFR50 DD.

[0237] In some embodiments, the fusion of the Cas with the DD comprises a linker between the DD and the Cas. In some embodiments, the linker is a GlySer linker. In some embodiments, the DD-Cas further comprises at least one Nuclear Export Signal (NES). In some embodiments, the DD-Cas comprises two or more NESs. In some embodiments, the DD-Cas comprises at least one Nuclear Localization Signal (NLS). This may be in addition to an NES. In some embodiments, the Cas comprises or consists essentially of or consists of a localization (nuclear import or export) signal as, or as part of, the linker between the Cas and the DD. HA or Flag tags are also within the ambit of the invention as linkers. Applicants use NLS and/or NES as linker and also use Glycine Serine linkers as short as GS up to (GGGGS)₃ (SEQ ID NO: 1).

[0238] Destabilizing domains have general utility to confer instability to a wide range of proteins; see, e.g., Miyazaki, J Am Chem Soc. Mar. 7, 2012; 134(9): 3942-3945, incorporated herein by reference. CMP8 or 4-hydroxytamoxifen can be destabilizing domains. More generally, A temperature-sensitive mutant of mammalian DHFR (DHFRts), a destabilizing residue by the N-end rule, was found to be stable at a permissive temperature but unstable at 37° C. The addition of methotrexate, a high-affinity ligand for mammalian DHFR, to cells expressing DHFRts inhibited degradation of the protein partially. This was an important demonstration that a small molecule ligand can stabilize a protein otherwise targeted for degradation in cells. A rapamycin derivative was used to stabilize an unstable mutant of the FRB domain of mTOR (FRB*) and restore the function of the fused kinase, GSK-3β.6,7 This system demonstrated that ligand-dependent stability represented an attractive strategy to regulate the function of a specific protein in a complex biological environment. A system to control protein activity can involve the DD becoming functional when the ubiquitin complementation occurs by rapamycin induced dimerization of FK506-binding protein and FKBP12. Mutants of human FKBP12 or ecDHFR protein can be engineered to be metabolically unstable in the absence of their high-affinity ligands, Shield-1 or trimethoprim (TMP), respectively. These mutants are some of the possible destabilizing domains (DDs) useful in the practice of the invention and instability of a DD as a fusion with a Cas confers to the Cas degradation of the entire fusion protein by the proteasome. Shield-1 and TMP bind to and stabilize the DD in a dose-dependent manner. The estrogen receptor ligand binding domain (ERLBD, residues 305-549 of ERS1) can also be engineered as a destabilizing domain. Since the estrogen receptor signaling pathway is involved in a variety of diseases such as breast cancer, the pathway has been widely studied and numerous agonist and antagonists of estrogen receptor have been developed. Thus, compatible pairs of ERLBD and drugs are known. There are ligands that bind to mutant but not wild-type forms of the ERLBD. By using one of these mutant domains encoding three mutations (L384M, M421G, G521R)12, it is possible to regulate the stability of an ERLBD-derived DD using a ligand that does not perturb endogenous estrogen-sensitive networks. An additional mutation (Y537S) can be introduced to further destabilize the ERLBD and to configure it as a potential DD candidate. This tetra-mutant is an advantageous DD development. The mutant ERLBD can be fused to a Cas and its stability can be regulated or perturbed using a ligand, whereby the Cas has a DD. Another DD can be a 12-kDa (107-amino-acid) tag based on a mutated FKBP protein, stabilized by Shield1 ligand; see, e.g., Nature Methods 5, (2008). For instance, a DD can be a modified FK506 binding protein 12 (FKBP12) that binds to and is reversibly stabilized by a synthetic, biologically inert small molecule, Shield-1; see, e.g., Banaszynski L A, Chen L C, Maynard-Smith L A, Ooi A G, Wandless T J. A rapid, reversible, and tunable method to regulate protein function in living cells using synthetic small molecules. Cell. 2006; 126:995-1004; Banaszynski L A, Sellmyer M A, Contag C H, Wandless T J, Thorne S H. Chemical control of protein stability and function in living mice. Nat Med. 2008; 14:1123-1127; Maynard-Smith L A, Chen L C, Banaszynski L A, Ooi A G, Wandless T J. A directed approach for engineering conditional protein stability using biologically silent small molecules. The Journal of biological chemistry. 2007; 282:24866-24872; and Rodriguez, Chem Biol. Mar. 23, 2012; 19(3): 391-398-all of which are incorporated herein by reference and may be employed in the practice of the invention in selected a DD to associate with a Cas in the practice of this invention. As can be seen, the knowledge in the art includes a number of DDs, and the DD can be associated with, e.g., fused to, advantageously with a linker, to a Cas, whereby the DD can be stabilized in the presence of a ligand and when there is the absence thereof the DD can become destabilized, whereby the Cas is entirely destabilized, or the DD can be stabilized in the absence of a ligand and when the ligand is present the DD can become destabilized; the DD allows the Cas and hence the CRISPR-Cas complex or system to be regulated or controlled-turned on or off so to speak, to thereby provide means for regulation or control of the system, e.g., in an in vivo or in vitro environment. For instance, when a protein of interest is expressed as a fusion with the DD tag, it is destabilized and rapidly degraded in the cell, e.g., by proteasomes. Thus, absence of stabilizing ligand leads to a D associated Cas being degraded. When a new DD is fused to a protein of interest, its instability is conferred to the protein of interest, resulting in the rapid degradation of the entire fusion protein. Peak activity for Cas is sometimes beneficial to reduce off-target effects. Thus, short bursts of high activity are preferred. The present invention in some embodiments is able to provide such peaks. In some senses the system is inducible. In some other senses, the system repressed in the absence of stabilizing ligand and de-repressed in the presence of stabilizing ligand.

### Deactivated/Inactivated/Dead Cas Proteins

[0239] In certain embodiments, the Cas protein herein is a catalytically inactive or dead Cas protein. In some cases, Cas protein herein is a catalytically inactive or dead Cas protein (dCas). In some cases, a dead Cas protein, e.g., a dead Cas protein has nickase activity. In some embodiments, the dCas protein comprises mutations in the nuclease domain. In some embodiments, the dCas protein has been truncated. In some cases, the dead Cas protein is a dead small Type II-D Cas protein or variant thereof.

[0240] Where the Type II-D Cas protein has nuclease activity, the Type II-D Cas protein may be modified to have diminished nuclease activity e.g., nuclease inactivation of at least 70%, at least 80%, at least 90%, at least 95%, at least 97%, or 100% as compared with the wild type enzyme; or to put in another way, a Cas protein having advantageously about 0% of the nuclease activity of the non-mutated or wild type Cas protein, or no more than about 3% or about 5% or about 10% of the nuclease activity of the non-mutated or wild type Type II-D Cas enzyme. This is possible by introducing mutations into the nuclease domains of the Type II-D Cas and orthologs thereof.

[0241] In certain embodiments, the CRISPR enzyme is engineered and can comprise one or more mutations that reduce or eliminate a nuclease activity. When the enzyme is not SpCas9, mutations may be made at any or all residues corresponding to positions 10, 762, 840, 854, 863 and/or 986 of SpCas9 (which may be ascertained for instance by standard sequence comparison tools). Homology modelling: Corresponding residues in other Cas orthologs can be identified by the methods of Zhang et al., 2012 (Nature; 490(7421): 556-60) and Chen et al., 2015 (PLoS Comput Biol; 11(5): e1004248)—a computational protein-protein interaction (PPI) method to predict interactions mediated by domain-motif interfaces. PrePPI (Predicting PPI), a structure based PPI prediction method, combines structural evidence with non-structural evidence using a Bayesian statistical framework. The method involves taking a pair of query proteins and using structural alignment to identify structural representatives that correspond to either their experimentally determined structures or homology models. Structural alignment is further used to identify both close and remote structural neighbors by considering global and local geometric relationships. Whenever two neighbors of the structural representatives form a complex reported in the Protein Data Bank, this defines a template for modelling the interaction between the two query proteins. Models of a complex are created by superimposing the representative structures on their corresponding structural neighbor in the template. This approach is in Dey et al., 2013 (Prot Sci; 22: 359-66).

[0242] In particular, any or all of the following mutations are preferred in SpCas9: D10, E762, H840, N854, N863, or D986; conservative substitution for any of the replacement amino acids is also envisaged. The point mutations that can substantially reduce nuclease activity include, but are not limited to, D10A, E762A, H840A, N854A, N863A and/or D986A. In some embodiments, the Type II-D Cas comprises two or more mutations, where the mutations are homologues of or the equivalent of D10, E762, H840, N854, N863, or D986 with reference to the SpCas9 protein. In some embodiments, the Type II-D Cas includes mutation that is the homolog or equivalent of an N580 mutation with reference to the SaCas9 protein. In some embodiments the Type II-D Cas includes a mutation that is the homologue or equivalent of an H840 mutation with respect to a Cas9 protein. In some embodiments, the Type II-D Cas comprises two or more mutations comprising D10A, E762A, H840A, N854A, N863A or D986A mutation(s) with reference to a SpCas9 protein or any corresponding ortholog, or N580A according to SaCas9 protein, or at least one mutation comprising H840A, or, optionally wherein the Type II-D Cas comprises: N580A according to SaCas9 protein or any corresponding ortholog; or D10A according to SpCas9 protein, or any corresponding ortholog, and N580A according to SaCas9 protein. In some embodiments, the Type II-D Cas comprises a H840A, or D10A and H840A, or D10A and N863A mutation(s), according to and with reference to a SpCas9 protein or any corresponding ortholog.

[0243] Mutations can also be made at neighboring residues, e.g., at amino acids near those indicated above that participate in the nuclease activity. In some embodiments, only the RuvC domain is inactivated, and in other embodiments, another putative nuclease domain is inactivated, wherein the effector protein complex functions as a nickase and cleaves only one DNA strand. In a preferred embodiment, the other putative nuclease domain is a HincII-like endonuclease domain. In some embodiments, two Type II-D Cas variants (each a different nickase) are used to increase specificity, two nickase variants are used to cleave DNA at a target (where both nickases cleave a DNA strand, while minimizing or eliminating off-target modifications where only one DNA strand is cleaved and subsequently repaired). In some embodiments, the Type II-D Cas effector protein cleaves sequences associated with or at a target locus of interest as a homodimer comprising two Type II-D Cas effector protein molecules. In some embodiments, the homodimer may comprise two Type II-D Cas effector protein molecules comprising a different mutation or mutation(s) in their respective RuvC domains.

[0244] The inactivated Type II-D Cas may have associated (e.g., via fusion protein) one or more functional domains, including for example, one or more domains from the group comprising, consisting essentially of, or consisting of methylase activity, demethylase activity, transcription activation activity, transcription repression activity, transcription release factor activity, histone modification activity, RNA cleavage activity, DNA cleavage activity, nucleic acid binding activity, and molecular switches (e.g., light inducible). Preferred domains are Fok1, VP64, P65, HSF1, MyoD1. In the event that Fok1 is provided, it is advantageous that multiple Fok1 functional domains are provided to allow for a functional dimer and that gRNAs are designed to provide proper spacing for functional use (Fok1) as specifically described in Tsai et al. Nature Biotechnology, Vol. 32, Number 6, June 2014). The adaptor protein may utilize known linkers to attach such functional domains. In some cases, it is advantageous that additionally at least one NLS is provided. In some instances, it is advantageous to position the NLS at the N terminus. When more than one functional domain is included, the functional domains may be the same or different.

[0245] In general, the positioning of the one or more functional domain on the inactivated Type II-D Cas is one which allows for correct spatial orientation for the functional domain to affect the target with the attributed functional effect. For example, if the functional domain is a transcription activator (e.g., VP64 or p65), the transcription activator is placed in a spatial orientation which allows it to affect the transcription of the target. Likewise, a transcription repressor will be advantageously positioned to affect the transcription of the target, and a nuclease (e.g., Fok1) will be advantageously positioned to cleave or partially cleave the target. This may include positions other than the N-/C-terminus of the CRISPR enzyme.

[0246] The dead or deactivated Cas proteins may be used as target-binding proteins, (e.g., DNA binding proteins). In these cases, the dead or deactivated Cas proteins may be fused with one or more functional domains.

[0247] As described herein, corresponding catalytic domains of a Type II-D Cas effector protein may also be mutated to produce a mutated Type II-D Cas effector protein lacking all DNA cleavage activity or having substantially reduced DNA cleavage activity. In some embodiments, a nucleic acid-targeting effector protein may be considered to substantially lack all RNA cleavage activity when the RNA cleavage activity of the mutated enzyme is about no more than 25%, 10%, 5%, 1%, 0.1%, 0.01%, or less of the nucleic acid cleavage activity of the non-mutated form of the enzyme; an example can be when the nucleic acid cleavage activity of the mutated form is nil or negligible as compared with the non-mutated form. An effector protein may be identified with reference to the general class of enzymes that share homology to the biggest nuclease with multiple nuclease domains from the Type II CRISPR system. In some embodiments, the effector protein is a Type II-D Cas. In further embodiments, the effector protein is a Type II protein. By “derived” as used in this context, it is meant that the derived enzyme is largely based, in the sense of having a high degree of sequence homology with, a wildtype enzyme, but that it has been mutated (modified) in some way as known in the art or as described herein.

### Other Cas Variants

[0248] In some embodiments, the Cas protein of the CRISPR-Cas complex is a Type II-D Cas protein comprising C80S and C574S mutations (with reference to SpCas9) and one or more mutations selected from the group consisting of S355C, E532C, E945C, E1068C, E1207C, S1116C, S1154C, S204C, D435C, E471C, K558C, Q674C, Q826C, S867C, and E1026C (with reference to SpCas9). The mutations can be introduced to the nucleotide sequence of (with reference to SpCas9) protein by conventional molecular biology techniques including, but not limited to, site-directed mutagenesis, CRISPR-Cas system, TALEN, ZFN, or meganucleases.

[0249] In some embodiments, the Cas protein of the CRISPR-Cas complex or system comprises a sortase recognition sequence Leu-Pro-Xxx-Thr-Gly (SEQ ID NO: 2). For example, a Type II-D Cas can be engineered to accommodate a single or multiple sortase recognition sequences (Leu-Pro-Xxx-Thr-Gly (SEQ ID NO: 2), where Xxx is any amino acid) at which position effector moieties can be linked. Sortase is a transpeptidase that cleaves its recognition sequence between Thr-Gly, and ligates an acceptor peptide containing an N-terminal glycine to the newly formed Thr carboxylate. Engineering sortase recognition sequences onto Type II-D Cas or other Cas proteins allows site-specific conjugation of any chemical payload. Insertion sites can be regions previously validated as cut sites for split Type II-D Cas, particularly those for which the N and C fragments have been shown to have a high affinity for each other.

[0250] One way to validate insertion sites in Type II-D Cas or other nucleic acid-targeting moiety as to tolerance to modification is by sortase-mediated ligation of the model substrate Gly-Gly-Gly-Lys(Biotin) (SEQ ID NO: 3). The biotin handle allows efficient detection of Type II-D Cas modification by immunoblotting and facilitates enrichment of labeled protein through affinity purification with anti-biotin or streptavidin. Cas9 activity has been validated using an EGFP based screening assay, wherein a U2OS.EGFP cell line is exposed to Cas9 containing a guide RNA sequence targeting EGFP, leading to loss of EGFP fluorescence. Active biotin-ligated Cas9 proteins can be validated for in vivo efficacy. Using the positively charged transfection agent, such as RNAiMAX, biotin-ligated Cas9-sgRNA ribonucleoproteins can be transfected into U2OS.EGFP cell lines, comparing the loss of GFP fluorescence to the introduction of wtCas9. A similar approach can be used to evaluate Type II-D Cas activity.

[0251] Sortase-mediated ligation allows attachment to the surface of Type II-D Cas or other nucleic acid targeting moiety many non-native chemicals that can enhance the activity and modulate the effects of Type II-D Cas. A particularly powerful example of this is in the local modulation of the NHEJ/HDR pathway in cells. As is described in greater detail elsewhere herein, in some embodiments, donor polynucleotides and/or DSB repair mechanism modulator(s) (e.g., HDR activators and/or NEHJ inhibitors can be attached to a Cas protein via sortase mediated ligation). It will be appreciated that such DSB repair mechanism modulators can also be attached to a Cas protein by other suitable methods, such as Gly-Ser linkers and others, described elsewhere herein. It will be appreciated that donor sequences can be attached via other approaches as well described in greater detail herein, such as HUH endonucleases.

### Guide Molecules

[0252] The CRISPR-Cas or Cas-Based system described herein can, in some embodiments, include one or more guide molecules. The terms guide molecule and guide polynucleotide refer to polynucleotides, particularly RNA molecules capable of guiding a Cas to a target genomic locus and include a guide sequence (i.e., the reprogrammable region capable of being modified for site-specific binding of a target polynucleotide) and a direct repeat or scaffold that facilitates binding with the Cas protein and are used interchangeably as in foregoing cited documents such as International Patent Publication No. WO 2014/093622 (PCT/US2013/074667). In general, a guide sequence is any polynucleotide sequence having sufficient complementarity with a target polynucleotide sequence to hybridize with the target sequence and direct sequence-specific binding of a CRISPR complex to the target sequence. The guide molecule can be a polynucleotide. In some embodiments, each Cas protein included in the CRISPR-Cas system is coupled with, is configured to complex with, or is otherwise associated with its own guide molecule. In some embodiments, each Cas protein in a system composed of more than one Cas protein, each Cas protein is associated with a different guide molecule(s) than other Cas proteins within the same system.

[0253] In some embodiments, the guide molecule contains a region capable of hybridizing to a cleaved strand of the target polynucleotide and a region capable of hybridizing to a donor/insert polynucleotide. These can also be referred to as a splint or a bridge guide molecule or polynucleotide, as together, the regions capable of hybridizing the donor/insert and the target polynucleotide form splint or bridge when hybridized to the donor/insert polynucleotide and the target polynucleotide and hold them in proximity to one another for subsequent reactions to occur, such as ligation, between the two molecules. Thus, in some embodiments, the guide molecule can act as a splint or a bridge molecule when configured in this way.

[0254] In some embodiments the system includes two guide molecules that can each be splint or bridge molecules. In some embodiments, the first and second guide molecules comprise a region capable of hybridizing to a cleaved strand of the target polynucleotide and a region capable of hybridizing to the donor sequence. In some embodiments, the composition comprises a splint oligonucleotide that has a region capable of hybridizing to a cleaved strand of the target polynucleotide and a region capable of hybridizing to the donor molecule.

[0255] The ability of a guide sequence (within a nucleic acid-targeting guide RNA) to direct sequence-specific binding of a nucleic acid-targeting complex to a target nucleic acid sequence may be assessed by any suitable assay. For example, the components of a nucleic acid-targeting CRISPR system sufficient to form a nucleic acid-targeting complex, including the guide sequence to be tested, may be provided to a host cell having the corresponding target nucleic acid sequence, such as by transfection with vectors encoding the components of the nucleic acid-targeting complex, followed by an assessment of preferential targeting (e.g., cleavage) within the target nucleic acid sequence, such as by Surveyor assay (Qui et al. 2004. BioTechniques. 36(4)702-707). Similarly, cleavage of a target nucleic acid sequence may be evaluated in a test tube by providing the target nucleic acid sequence, components of a nucleic acid-targeting complex, including the guide sequence to be tested and a control guide sequence different from the test guide sequence, and comparing binding or rate of cleavage at the target sequence between the test and control guide sequence reactions. Other assays are possible and will occur to those skilled in the art.

[0256] In some embodiments, the guide molecule is an RNA. The guide molecule(s) (also referred to interchangeably herein as guide polynucleotide and guide sequence) that are included in the CRISPR-Cas or Cas based system can be any polynucleotide sequence having sufficient complementarity with a target nucleic acid sequence to hybridize with the target nucleic acid sequence and direct sequence-specific binding of a nucleic acid-targeting complex to the target nucleic acid sequence. In some embodiments, the degree of complementarity, when optimally aligned using a suitable alignment algorithm, can be about or more than about 50%, 60%, 75%, 80%, 85%, 90%, 95%, 97.5%, 99%, or more. Optimal alignment may be determined with the use of any suitable algorithm for aligning sequences, non-limiting examples of which include the Smith-Waterman algorithm, the Needleman-Wunsch algorithm, algorithms based on the Burrows-Wheeler Transform (e.g., the Burrows Wheeler Aligner), Clustal W, Clustal X, BLAT, Novoalign (Novocraft Technologies; available at www.novocraft.com), ELAND (Illumina, San Diego, CA), SOAP (available at soap.genomics.org.cn), and Maq (available at maq.sourceforge.net).

[0257] A guide sequence, and hence a nucleic acid-targeting guide, may be selected to target any target nucleic acid sequence. The target sequence may be DNA. The target sequence may be any RNA sequence. In some embodiments, the target sequence may be a sequence within an RNA molecule selected from the group consisting of messenger RNA (mRNA), pre-mRNA, ribosomal RNA (rRNA), transfer RNA (tRNA), micro-RNA (miRNA), small interfering RNA (siRNA), small nuclear RNA (snRNA), small nucleolar RNA (snoRNA), double stranded RNA (dsRNA), non-coding RNA (ncRNA), long non-coding RNA (lncRNA), and small cytoplasmatic RNA (scRNA). In some preferred embodiments, the target sequence may be a sequence within an RNA molecule selected from the group consisting of mRNA, pre-mRNA, and rRNA. In some preferred embodiments, the target sequence may be a sequence within an RNA molecule selected from the group consisting of ncRNA, and lncRNA. In some more preferred embodiments, the target sequence may be a sequence within an mRNA molecule or a pre-mRNA molecule.

[0258] In some embodiments, a nucleic acid-targeting guide is selected to reduce the degree secondary structure within the nucleic acid-targeting guide. In some embodiments, about or less than about 75%, 50%, 40%, 30%, 25%, 20%, 15%, 10%, 5%, 1%, or fewer of the nucleotides of the nucleic acid-targeting guide participate in self-complementary base pairing when optimally folded. Optimal folding may be determined by any suitable polynucleotide folding algorithm. Some programs are based on calculating the minimal Gibbs free energy. An example of one such algorithm is mFold, as described by Zuker and Stiegler (Nucleic Acids Res. 9 (1981), 133-148). Another example folding algorithm is the online webserver RNAfold, developed at Institute for Theoretical Chemistry at the University of Vienna, using the centroid structure prediction algorithm (see e.g., A. R. Gruber et al., 2008, Cell 106(1): 23-24; and PA Carr and GM Church, 2009, Nature Biotechnology 27(12): 1151-62).

[0259] In some embodiments, the guide molecule is configured to minimize or reduce off-target effects. Guide sequences and strategies to minimize toxicity and off-target effects can be as in WO 2014/093622 (PCT/US2013/074667); or, via mutation as described herein.

[0260] In certain embodiments, a guide RNA or crRNA includes or is only composed of a direct repeat (DR) sequence and a guide sequence or spacer sequence. In certain embodiments, the guide RNA or crRNA includes or is only composed of a direct repeat sequence fused or linked to a guide sequence or spacer sequence. In certain embodiments, the direct repeat sequence may be located upstream (i.e., 5′) from the guide sequence or spacer sequence. In other embodiments, the direct repeat sequence may be located downstream (i.e., 3′) from the guide sequence or spacer sequence.

[0261] In certain embodiments, the crRNA comprises a stem loop, preferably a single stem loop. In certain embodiments, the direct repeat sequence forms a stem loop, preferably a single stem loop.

[0262] In certain embodiments, the spacer length of the guide RNA is from 15 to 35 nt. In certain embodiments, the spacer length of the guide RNA is at least 15 nucleotides. In certain embodiments, the spacer length is from 15 to 17 nt, e.g., 15, 16, or 17 nt, from 17 to 20 nt, e.g., 17, 18, 19, or 20 nt, from 20 to 24 nt, e.g., 20, 21, 22, 23, or 24 nt, from 23 to 25 nt, e.g., 23, 24, or 25 nt, from 24 to 27 nt, e.g., 24, 25, 26, or 27 nt, from 27 to 30 nt, e.g., 27, 28, 29, or 30 nt, from 30 to 35 nt, e.g., 30, 31, 32, 33, 34, or 35 nt, or 35 nt or longer.

[0263] The “tracrRNA” sequence or analogous terms includes any polynucleotide sequence that has sufficient complementarity with a crRNA sequence to hybridize. In some embodiments, the degree of complementarity between the tracrRNA sequence and crRNA sequence along the length of the shorter of the two when optimally aligned is about or more than about 25%, 30%, 40%, 50%, 60%, 70%, 80%, 90%, 95%, 97.5%, 99%, or higher. In some embodiments, the tracr sequence is about or more than about 5, 6, 7, 8, 9, 10, 11, 12, 13, 14, 15, 16, 17, 18, 19, 20, 25, 30, 40, 50, or more nucleotides in length. In some embodiments, the tracr sequence and crRNA sequence are contained within a single transcript, such that hybridization between the two produces a transcript having a secondary structure, such as a hairpin.

[0264] In general, degree of complementarity is with reference to the optimal alignment of the sca sequence and tracr sequence, along the length of the shorter of the two sequences. Optimal alignment may be determined by any suitable alignment algorithm and may further account for secondary structures, such as self-complementarity within either the sca sequence or tracr sequence. In some embodiments, the degree of complementarity between the tracr sequence and sea sequence along the length of the shorter of the two when optimally aligned is about or more than about 25%, 30%, 40%, 50%, 60%, 70%, 80%, 90%, 95%, 97.5%, 99%, or higher.

[0265] In some embodiments, the degree of complementarity between a guide sequence and its corresponding target sequence can be about or more than about 50%, 60%, 75%, 80%, 85%, 90%, 95%, 97.5%, 99%, or 100%; a guide or RNA or sgRNA can be about or more than about 5, 10, 11, 12, 13, 14, 15, 16, 17, 18, 19, 20, 21, 22, 23, 24, 25, 26, 27, 28, 29, 30, 35, 40, 45, 50, 75, or more nucleotides in length; or guide or RNA or sgRNA can be less than about 75, 50, 45, 40, 35, 30, 25, 20, 15, 12, or fewer nucleotides in length; and tracr RNA can be 30 or 50 nucleotides in length. In some embodiments, the degree of complementarity between a guide sequence and its corresponding target sequence is greater than 94.5% or 95% or 95.5% or 96% or 96.5% or 97% or 97.5% or 98% or 98.5% or 99% or 99.5% or 99.9%, or 100%. Off target is less than 100% or 99.9% or 99.5% or 99% or 99% or 98.5% or 98% or 97.5% or 97% or 96.5% or 96% or 95.5% or 95% or 94.5% or 94% or 93% or 92% or 91% or 90% or 89% or 88% or 87% or 86% or 85% or 84% or 83% or 82% or 81% or 80% complementarity between the sequence and the guide, with it being advantageous that off target is 100% or 99.9% or 99.5% or 99% or 99% or 98.5% or 98% or 97.5% or 97% or 96.5% or 96% or 9 5.5% or 95% or 94.5% complementarity between the sequence and the guide.

[0266] In some embodiments according to the invention, the guide RNA (capable of guiding Cas to a target locus) may comprise (1) a guide sequence capable of hybridizing to a genomic target locus in the eukaryotic cell; (2) a tracr sequence; and (3) a tracr mate sequence. All (1) to (3) may reside in a single RNA, i.e., an sgRNA (arranged in a 5′ to 3′ orientation), or the tracr RNA may be a different RNA than the RNA containing the guide and tracr sequence. The tracr hybridizes to the tracr mate sequence and directs the CRISPR/Cas complex to the target sequence. Where the tracr RNA is on a different RNA than the RNA containing the guide and tracr sequence, the length of each RNA may be optimized to be shortened from their respective native lengths, and each may be independently chemically modified to protect from degradation by cellular RNase or otherwise increase stability.

[0267] Many modifications to guide sequences are known in the art and are further contemplated within the context of this invention. Various modifications may be used to increase the specificity of binding to the target sequence and/or increase the activity of the Cas protein and/or reduce off-target effects. Example guide sequence modifications are described in International Patent Application No. PCT US2019/045582, specifically paragraphs [0178]-[0333], which is incorporated herein by reference as if expressed in its entirety herein.

### Target Sequences, PAMs, and PFSs

### Target Sequences

[0268] In the context of formation of a CRISPR complex, “target sequence” refers to a sequence to which a guide sequence is designed to have complementarity, where hybridization between a target sequence and a guide sequence promotes the formation of a CRISPR complex. A target sequence may comprise RNA polynucleotides. The term “target RNA” refers to an RNA polynucleotide being or comprising the target sequence. In other words, the target polynucleotide can be a polynucleotide or a part of a polynucleotide to which a part of the guide sequence is designed to have complementarity with and to which the effector function mediated by the complex comprising the CRISPR effector protein and a guide molecule is to be directed. In some embodiments, a target sequence is located in the nucleus or cytoplasm of a cell.

[0269] The guide sequence can specifically bind a target sequence in a target polynucleotide. The target polynucleotide may be DNA. The target polynucleotide may be RNA. The target polynucleotide can have one or more (e.g., 1, 2, 3, 4, 5, 6, 7, 8, 9, 10, etc. or more) target sequences. The target polynucleotide can be on a vector. The target polynucleotide can be genomic DNA. The target polynucleotide can be episomal. Other forms of the target polynucleotide are described elsewhere herein.

[0270] The target sequence may be DNA. The target sequence may be any RNA sequence. In some embodiments, the target sequence may be a sequence within an RNA molecule selected from the group consisting of messenger RNA (mRNA), pre-mRNA, ribosomal RNA (rRNA), transfer RNA (tRNA), micro-RNA (miRNA), small interfering RNA (siRNA), small nuclear RNA (snRNA), small nucleolar RNA (snoRNA), double stranded RNA (dsRNA), non-coding RNA (ncRNA), long non-coding RNA (lncRNA), and small cytoplasmatic RNA (scRNA). In some preferred embodiments, the target sequence (also referred to herein as a target polynucleotide) may be a sequence within an RNA molecule selected from the group consisting of mRNA, pre-mRNA, and rRNA. In some preferred embodiments, the target sequence may be a sequence within an RNA molecule selected from the group consisting of ncRNA, and lncRNA. In some more preferred embodiments, the target sequence may be a sequence within an mRNA molecule or a pre-mRNA molecule.

### PAM and PFS Elements

[0271] PAM elements are sequences that can be recognized and bound by Cas proteins. Cas proteins/effector complexes can then unwind the dsDNA at a position adjacent to the PAM element. It will be appreciated that Cas proteins and systems that include them that target RNA do not require PAM sequences (Marraffini et al. 2010. Nature. 463:568-571). Instead, many rely on PFSs, which are discussed elsewhere herein. In certain embodiments, the target sequence should be associated with a PAM (protospacer adjacent motif) or PFS (protospacer flanking sequence or site), that is, a short sequence recognized by the CRISPR complex. Depending on the nature of the CRISPR-Cas protein, the target sequence should be selected, such that its complementary sequence in the DNA duplex (also referred to herein as the non-target sequence) is upstream or downstream of the PAM. In the embodiments, the complementary sequence of the target sequence is downstream or 3′ of the PAM or upstream or 5′ of the PAM. The precise sequence and length requirements for the PAM differ depending on the Cas protein used, but PAMs are typically 2-5 base pair sequences adjacent the protospacer (that is, the target sequence). Examples of the natural PAM sequences for different Cas proteins are provided herein below and the skilled person will be able to identify further PAM sequences for use with a given Cas protein.

[0272] The ability to recognize different PAM sequences depends on the Cas polypeptide(s) included in the system. See e.g., Gleditzsch et al. 2019. RNA Biology. 16(4):504-517. Table 1 (from Gleditzsch et al. 2019) below shows several Cas polypeptides and the PAM sequence they recognize.

TABLE 1
Example PAM Sequences

| Cas Protein | PAM Sequence |
|---|---|
| SpCas9 | NGG/NRG |
| SaCas9 | NGRRT or NGRRN |
| NmeCas9 | NNNNGATT |
| CjCas9 | NNNNRYAC |
| StCas9 | NNAGAAW |
| Cas12a (Cpf1) (including | TTTV |
| LbCpf1 and AsCpf1) | |
| Cas12b (C2c1) | TTT, TTA, and TTC |
| Cas12c (C2c3) | TA |
| Cas12d (CasY) | TA |
| Cas12e (CasX) | 5′-TTCN-3′ |

[0273] In some embodiments, the CRISPR effector protein may recognize a 3′ PAM. In certain embodiments, the CRISPR effector protein may recognize a 3′ PAM which is 5′H, wherein H is A, C or U.

[0274] Further, engineering of the PAM Interacting (PI) domain on the Cas protein may allow programing of PAM specificity, improve target site recognition fidelity, and increase the versatility of the CRISPR-Cas protein such as a Type II-D Cas of the present invention, for example as described for Cas9 in Kleinstiver B P et al. Engineered CRISPR-Cas9 nucleases with altered PAM specificities. Nature. 2015 Jul. 23; 523(7561):481-5. doi: 10.1038/nature14592. As further detailed herein, the skilled person will understand that Cas13 proteins may be modified analogously. Gao et al, “Engineered Cpf1 Enzymes with Altered PAM Specificities,” bioRxiv 091611; doi: http://dx.doi.org/10.1101/091611 (Dec. 4, 2016). Doench et al. created a pool of sgRNAs, tiling across all possible target sites of a panel of six endogenous mouse and three endogenous human genes and quantitatively assessed their ability to produce null alleles of their target gene by antibody staining and flow cytometry. The authors showed that optimization of the PAM improved activity and also provided an on-line tool for designing sgRNAs.

[0275] PAM sequences can be identified in a polynucleotide using an appropriate design tool, which are commercially available as well as online. Such freely available tools include, but are not limited to, CRISPRFinder and CRISPRTarget. Mojica et al. 2009. Microbiol. 155(Pt. 3):733-740; Atschul et al. 1990. J. Mol. Biol. 215:403-410; Biswass et al. 2013 RNA Biol. 10:817-827; and Grissa et al. 2007. Nucleic Acid Res. 35:W52-57. Experimental approaches to PAM identification can include, but are not limited to, plasmid depletion assays (Jiang et al. 2013. Nat. Biotechnol. 31:233-239; Esvelt et al. 2013. Nat. Methods. 10:1116-1121; Kleinstiver et al. 2015. Nature. 523:481-485), screened by a high-throughput in vivo model called PAM-SCNAR (Pattanayak et al. 2013. Nat. Biotechnol. 31:839-843 and Leenay et al. 2016. Mol. Cell. 16:253), and negative screening (Zetsche et al. 2015. Cell. 163:759-771).

[0276] As previously mentioned, CRISPR-Cas systems that target RNA do not typically rely on PAM sequences. Instead, such systems typically recognize protospacer flanking sites (PFSs) instead of PAMs Thus, Type VI CRISPR-Cas systems typically recognize protospacer flanking sites (PFSs) instead of PAMs. PFSs represents an analogue to PAMs for RNA targets. Type VI CRISPR-Cas systems employ a Cas13. Some Cas13 proteins analyzed to date, such as Cas13a (C2c2) identified from Leptotrichia shahii (LShCAs13a) have a specific discrimination against G at the 3′end of the target RNA. The presence of a C at the corresponding crRNA repeat site can indicate that nucleotide pairing at this position is rejected. However, some Cas13 proteins (e.g., LwaCAs13a and PspCas13b) do not seem to have a PFS preference. See e.g., Gleditzsch et al. 2019. RNA Biology. 16(4):504-517.

[0277] Some Type VI proteins, such as subtype B, have 5′-recognition of D (G, T, A) and a 3′-motif requirement of NAN or NNA. One example is the Cas13b protein identified in Bergeyella zoohelcum (BzCas13b). See e.g., Gleditzsch et al. 2019. RNA Biology. 16(4):504-517.

[0278] Overall Type VI CRISPR-Cas systems appear to have less restrictive rules for substrate (e.g., target sequence) recognition than those that target DNA (e.g., Type V and type II).

### Nucleus Targeting and Transportation

[0279] In some embodiments, one or more components (e.g., the Cas protein and/or deaminase) in the composition for engineering cells may comprise one or more sequences related to nucleus targeting and transportation. Such sequence may facilitate the one or more components in the composition for targeting a sequence within a cell. In order to improve targeting of the CRISPR-Cas protein and/or the nucleotide deaminase protein or catalytic domain thereof used in the methods of the present disclosure to the nucleus, it may be advantageous to provide one or both of these components with one or more nuclear localization sequences (NLSs).

[0280] In some embodiments, the NLSs used in the context of the present disclosure are heterologous to the proteins. Non-limiting examples of NLSs include an NLS sequence derived from: the NLS of the SV40 virus large T-antigen, having the amino acid sequence PKKKRKV (SEQ ID NO: 4) or PKKKRKVEAS (SEQ ID NO: 5); the NLS from nucleoplasmin (e.g., the nucleoplasmin bipartite NLS with the sequence KRPAATKKAGQAKKKK (SEQ ID NO:6)); the c-myc NLS having the amino acid sequence PAAKRVKLD (SEQ ID NO: 7) or RQRRNELKRSP (SEQ ID NO: 8); the hRNPA1 M9 NLS having the sequence NQSSNFGPMKGGNFGGRSSGPYGGGGQYFAKPRNQGGY (SEQ ID NO: 9); the sequence RMRIZFKNKGKDTAELRRRRVEVSVELRKAKKDEQILKRRNV (SEQ ID NO: 10) of the IBB domain from importin-alpha; the sequences VSRKRPRP (SEQ ID NO: 11) and PPKKARED (SEQ ID NO: 12) of the myoma T protein; the sequence PQPKKKPL (SEQ ID NO: 13) of human p53; the sequence SALIKKKKKMAP (SEQ ID NO: 14) of mouse c-abl IV; the sequences DRLRR (SEQ ID NO: 15) and PKQKKRK (SEQ ID NO: 16) of the influenza virus NS1; the sequence RKLKKKIKKL (SEQ ID NO: 17) of the Hepatitis virus delta antigen; the sequence REKKKFLKRR (SEQ ID NO: 18) of the mouse Mxl protein; the sequence KRKGDEVDGVDEVAKKKSKK (SEQ ID NO: 19) of the human poly(ADP-ribose) polymerase; and the sequence RKCLQAGMNLEARKTKK (SEQ ID NO: 20) of the steroid hormone receptors (human) glucocorticoid. In general, the one or more NLSs are of sufficient strength to drive accumulation of the DNA-targeting Cas protein in a detectable amount in the nucleus of a eukaryotic cell. In general, strength of nuclear localization activity may derive from the number of NLSs in the CRISPR-Cas protein, the particular NLS(s) used, or a combination of these factors. Detection of accumulation in the nucleus may be performed by any suitable technique. For example, a detectable marker may be fused to the nucleic acid-targeting protein, such that location within a cell may be visualized, such as in combination with a means for detecting the location of the nucleus (e.g., a stain specific for the nucleus such as DAPI). Cell nuclei may also be isolated from cells, the contents of which may then be analyzed by any suitable process for detecting protein, such as immunohistochemistry, Western blot, or enzyme activity assay. Accumulation in the nucleus may also be determined indirectly, such as by an assay for the effect of nucleic acid-targeting complex formation (e.g., assay for deaminase activity) at the target sequence, or assay for altered gene expression activity affected by DNA-targeting complex formation and/or DNA-targeting), as compared to a control not exposed to the CRISPR-Cas protein and deaminase protein, or exposed to a CRISPR-Cas and/or deaminase protein lacking the one or more NLSs.

[0281] The CRISPR-Cas and/or nucleotide deaminase proteins may be provided with 1 or more, such as with, 2, 3, 4, 5, 6, 7, 8, 9, 10, or more heterologous NLSs. In some embodiments, the proteins comprises about or more than about 1, 2, 3, 4, 5, 6, 7, 8, 9, 10, or more NLSs at or near the amino-terminus, about or more than about 1, 2, 3, 4, 5, 6, 7, 8, 9, 10, or more NLSs at or near the carboxy-terminus, or a combination of these (e.g., zero or at least one or more NLS at the amino-terminus and zero or at one or more NLS at the carboxy terminus). When more than one NLS is present, each may be selected independently of the others, such that a single NLS may be present in more than one copy and/or in combination with one or more other NLSs present in one or more copies. In some embodiments, an NLS is considered near the N- or C-terminus when the nearest amino acid of the NLS is within about 1, 2, 3, 4, 5, 10, 15, 20, 25, 30, 40, 50, or more amino acids along the polypeptide chain from the N- or C-terminus. In preferred embodiments of the CRISPR-Cas proteins, an NLS attached to the C-terminal of the protein.

[0282] In certain embodiments, the CRISPR-Cas protein and the deaminase protein are delivered to the cell or expressed within the cell as separate proteins. In these embodiments, each of the CRISPR-Cas and deaminase protein can be provided with one or more NLSs as described herein. In certain embodiments, the CRISPR-Cas and deaminase proteins are delivered to the cell or expressed with the cell as a fusion protein. In these embodiments one or both of the CRISPR-Cas and deaminase protein is provided with one or more NLSs. Where the nucleotide deaminase is fused to an adaptor protein (such as MS2) as described above, the one or more NLS can be provided on the adaptor protein, provided that this does not interfere with aptamer binding. In particular embodiments, the one or more NLS sequences may also function as linker sequences between the nucleotide deaminase and the CRISPR-Cas protein.

[0283] In certain embodiments, guides of the disclosure comprise specific binding sites (e.g. aptamers) for adapter proteins, which may be linked to or fused to a nucleotide deaminase or catalytic domain thereof. When such a guide forms a CRISPR complex (e.g., CRISPR-Cas protein binding to guide and target), the adapter proteins bind and the nucleotide deaminase or catalytic domain thereof associated with the adapter protein is positioned in a spatial orientation which is advantageous for the attributed function to be effective.

[0284] The skilled person will understand that modifications to the guide which allow for binding of the adapter+nucleotide deaminase, but not proper positioning of the adapter+nucleotide deaminase (e.g., due to steric hindrance within the three-dimensional structure of the CRISPR complex) are modifications which are not intended. The one or more modified guide may be modified at the tetra loop, the stem loop 1, stem loop 2, or stem loop 3, as described herein, preferably at either the tetra loop or stem loop 2, and in some cases at both the tetra loop and stem loop 2.

[0285] In some embodiments, a component (e.g., the dead Cas protein, the nucleotide deaminase protein or catalytic domain thereof, or a combination thereof) in the systems may comprise one or more nuclear export signals (NES), one or more nuclear localization signals (NLS), or any combinations thereof. In some cases, the NES may be an HIV Rev NES. In certain cases, the NES may be MAPK NES. When the component is a protein, the NES or NLS may be at the C terminus of component. Alternatively or additionally, the NES or NLS may be at the N terminus of component. In some examples, the Cas protein and optionally said nucleotide deaminase protein or catalytic domain thereof comprise one or more heterologous nuclear export signal(s) (NES(s)) or nuclear localization signal(s) (NLS(s)), preferably an HIV Rev NES or MAPK NES, preferably C-terminal.

### Templates

[0286] In some embodiments, the composition for engineering cells comprise a template, e.g., a recombination or repair template or simply template. A template nucleic acid, as that term is used herein, refers to a nucleic acid sequence which can be used in conjunction with a Cas or an ortholog or homolog thereof, preferably a Cas molecule and a guide RNA molecule to alter the structure of a target position. The template nucleic acid may comprise a template sequence. The template nucleic acid may be comprised in the guide molecule. In an embodiment, the target nucleic acid is modified to have some or all of the sequence of the template nucleic acid, typically at or near cleavage site(s). In an embodiment, the template nucleic acid is single stranded. In an alternate embodiment, the template nucleic acid is double stranded. In an embodiment, the template nucleic acid is DNA, e.g., double stranded DNA. In an alternate embodiment, the template nucleic acid is single stranded DNA.

[0287] A template may be a component of another vector as described herein, contained in a separate vector, or provided as a separate polynucleotide. In some embodiments, a recombination template is designed to serve as a template in homologous recombination, such as within or near a target sequence nicked or cleaved by a nucleic acid-targeting effector protein as a part of a nucleic acid-targeting complex.

[0288] In some embodiments, the template sequence is integrated or part of a guide molecule. In some embodiments, the template sequence is positioned at the 3′ end of a guide molecule. In some embodiments, the template sequence is positioned at the 5′ end of a guide molecule.

[0289] In some embodiments, the template sequence is attached or otherwise coupled (e.g., via a linker or other tether molecule to a Cas protein of the CRISPR-Cas system or other component thereof. Suitable linkers and tethers are described in greater detail elsewhere herein, such as in connection with donor polynucleotides and/or accessory molecules.

[0290] In an embodiment, the template nucleic acid alters the sequence of the target position. In an embodiment, the template nucleic acid results in the incorporation of a modified, or non-naturally occurring base into the target nucleic acid.

[0291] The template sequence may undergo a breakage mediated or catalyzed recombination with the target sequence. In an embodiment, the template nucleic acid may include sequence that corresponds to a site on the target sequence that is cleaved by a Cas protein mediated cleavage event. In an embodiment, the template nucleic acid may include a sequence that corresponds to both, a first site on the target sequence that is cleaved in a first Cas protein mediated event, and a second site on the target sequence that is cleaved in a second Cas protein mediated event.

[0292] In certain embodiments, the template nucleic acid can include a sequence which results in an alteration in the coding sequence of a translated sequence, e.g., one which results in the substitution of one amino acid for another in a protein product, e.g., transforming a mutant allele into a wild type allele, transforming a wild type allele into a mutant allele, and/or introducing a stop codon, insertion of an amino acid residue, deletion of an amino acid residue, or a nonsense mutation. In certain embodiments, the template nucleic acid can include a sequence which results in an alteration in a non-coding sequence, e.g., an alteration in an exon or in a 5′ or 3′ non-translated or non-transcribed region. Such alterations include an alteration in a control element, e.g., a promoter, enhancer, and an alteration in a cis-acting or trans-acting control element.

[0293] A template nucleic acid having homology with a target position in a target gene may be used to alter the structure of a target sequence. The template sequence may be used to alter an unwanted structure, e.g., an unwanted or mutant nucleotide. The template nucleic acid may include a sequence which, when integrated, results in decreasing the activity of a positive control element; increasing the activity of a positive control element; decreasing the activity of a negative control element; increasing the activity of a negative control element; decreasing the expression of a gene; increasing the expression of a gene; increasing resistance to a disorder or disease; increasing resistance to viral entry; correcting a mutation or altering an unwanted amino acid residue conferring, increasing, abolishing or decreasing a biological property of a gene product, e.g., increasing the enzymatic activity of an enzyme, or increasing the ability of a gene product to interact with another molecule.

[0294] The template nucleic acid may include a sequence which results in a change in sequence of 1, 2, 3, 4, 5, 6, 7, 8, 9, 10, 11, 12 or more nucleotides of the target sequence.

[0295] A template polynucleotide may be of any suitable length, such as about or more than about 10, 15, 20, 25, 50, 75, 100, 150, 200, 500, 1000, or more nucleotides in length. In an embodiment, the template nucleic acid may be 20+/−10, 30+/−10, 40+/−10, 50+/−10, 60+/−10, 70+/−10, 80+/−10, 90+/−10, 100+/−10, 110+/−10, 120+/−10, 130+/−10, 140+/−10, 150+/−10, 160+/−10, 170+/−10, 180+/−10, 190+/−10, 200+/−10, 210+/−10, of 220+/−10 nucleotides in length. In an embodiment, the template nucleic acid may be 30+/−20, 40+/−20, 50+/−20, 60+/−20, 70+/−20, 80+/−20, 90+/−20, 100+/−20, 110+/−20, 120+/−20, 130+/−20, 140+/−20, I 50+/−20, 160+/−20, 170+/−20, 180+/−20, 190+/−20, 200+/−20, 210+/−20, of 220+/−20 nucleotides in length. In an embodiment, the template nucleic acid is 10 to 1,000, 20 to 900, 30 to 800, 40 to 700, 50 to 600, 50 to 500, 50 to 400, 50 to 300, 50 to 200, or 50 to 100 nucleotides in length.

[0296] In some embodiments, the template polynucleotide is complementary to a portion of a polynucleotide comprising the target sequence. When optimally aligned, a template polynucleotide might overlap with one or more nucleotides of a target sequences (e.g., about or more than about 1, 5, 10, 15, 20, 25, 30, 35, 40, 45, 50, 60, 70, 80, 90, 100 or more nucleotides). In some embodiments, when a template sequence and a polynucleotide comprising a target sequence are optimally aligned, the nearest nucleotide of the template polynucleotide is within about 1, 5, 10, 15, 20, 25, 50, 75, 100, 200, 300, 400, 500, 1000, 5000, 10000, or more nucleotides from the target sequence.

[0297] The exogenous polynucleotide template comprises a sequence to be integrated (e.g., a mutated gene). The sequence for integration may be a sequence endogenous or exogenous to the cell. Examples of a sequence to be integrated include polynucleotides encoding a protein or a non-coding RNA (e.g., a microRNA). Thus, the sequence for integration may be operably linked to an appropriate control sequence or sequences. Alternatively, the sequence to be integrated may provide a regulatory function.

[0298] An upstream or downstream sequence may comprise from about 20 bp to about 2500 bp, for example, about 50, 100, 200, 300, 400, 500, 600, 700, 800, 900, 1000, 1100, 1200, 1300, 1400, 1500, 1600, 1700, 1800, 1900, 2000, 2100, 2200, 2300, 2400, or 2500 bp. In some methods, the exemplary upstream or downstream sequence have about 200 bp to about 2000 bp, about 600 bp to about 1000 bp, or more particularly about 700 bp to about 1000.

[0299] An upstream or downstream sequence may comprise from about 20 bp to about 2500 bp, for example, about 50, 100, 200, 300, 400, 500, 600, 700, 800, 900, 1000, 1100, 1200, 1300, 1400, 1500, 1600, 1700, 1800, 1900, 2000, 2100, 2200, 2300, 2400, or 2500 bp. In some methods, the exemplary upstream or downstream sequence have about 200 bp to about 2000 bp, about 600 bp to about 1000 bp, or more particularly about 700 bp to about 1000

[0300] In certain embodiments, one or both homology arms may be shortened to avoid including certain sequence repeat elements. For example, a 5′ homology arm may be shortened to avoid a sequence repeat element. In other embodiments, a 3′ homology arm may be shortened to avoid a sequence repeat element. In some embodiments, both the 5′ and the 3′ homology arms may be shortened to avoid including certain sequence repeat elements.

[0301] In some methods, the exogenous polynucleotide template may further comprise a marker. Such a marker may make it easy to screen for targeted integrations. Examples of suitable markers include restriction sites, fluorescent proteins, or selectable markers. The exogenous polynucleotide template of the disclosure can be constructed using recombinant techniques (see, for example, Sambrook et al., 2001 and Ausubel et al., 1996).

[0302] In certain embodiments, a template nucleic acid for correcting a mutation may designed for use as a single-stranded oligonucleotide. When using a single-stranded oligonucleotide, 5′ and 3′ homology arms may range up to about 200 base pairs (bp) in length, e.g., at least 25, 50, 75, 100, 125, 150, 175, or 200 bp in length.

[0303] Suzuki et al. describe in vivo genome editing via CRISPR/Cas9 mediated homology-independent targeted integration (2016, Nature 540:144-149), which can be adapted for use with the Type II-D Cas proteins and systems thereof of the present invention.

### Accessory Molecules

[0304] Additional accessory molecules, such as additional CRISPR effectors and/or other accessory molecules can be included in the nucleic acid targeting systems described herein in addition to the Cas polypeptides described elsewhere herein. In some embodiments, the accessory molecules can be other effector and/or targeting proteins or molecules. Accessory molecules can be or be derived from a Type I, II, III, IV, V, CRISPR-Cas system. The accessory molecules can modify or modulate Cas or other CRISPR-Cas system component function or activity.

[0305] In certain embodiments, an accessory molecule can be identified by their proximity to a Cas gene and/or a CRISPR array (e.g., within the region 20 kb from the start of the Cas gene and/or CRISPR array). Non-limiting examples of Cas proteins that can be included as accessory molecules in the Type II-D Cas or system thereof of the present invention include, but are not limited to, Cas1, Cas1B, Cas2, Cas3, Cas4, Cas5, Cas6, Cas7, Cas8, Cas9 (also known as Csn1 and Csx12), Cas10, Cas12 (also known as Cpf1), Cas13, Cas 14, Csy1, Csy2, Csy3, Cse1, Cse2, Csc1, Csc2, Csa5, Csn2, Csm2, Csm3, Csm4, Csm5, Csm6, Cmr1, Cmr3, Cmr4, Cmr5, Cmr6, Csb1, Csb2, Csb3, Csx17, Csx14, Csx10, Csx16, CsaX, Csx3, Csx1, Csx15, Csf1, Csf2, Csf3, Csf4, C2c2, homologues thereof, orthologues thereof, or modified versions thereof. The terms “orthologue” (also referred to as “ortholog” herein) and “homologue” (also referred to as “homolog” herein) are well known in the art. By means of further guidance, a “homologue” of a protein as used herein is a protein of the same species which performs the same or a similar function as the protein it is a homologue of. Homologous proteins may but need not be structurally related or are only partially structurally related. An “orthologue” of a protein as used herein is a protein of a different species which performs the same or a similar function as the protein it is an orthologue of Orthologous proteins may, but need not be structurally related, or are only partially structurally related. Such definition applies throughout this specification.

[0306] In some embodiments, one or more elements of a nucleic acid-targeting system is derived from a particular organism comprising an endogenous RNA-targeting system. In particular embodiments, the Type VI RNA-targeting Cas enzyme is C2c2. In an embodiment of the invention, there is provided a effector protein which comprises an amino acid sequence having at least 80% sequence homology to the wild-type sequence of any of Leptotrichia shahii C2c2, Lachnospiraceae bacterium MA2020 C2c2, Lachnospiraceae bacterium NK4A179 C2c2, Clostridium aminophilum (DSM 10710) C2c2, Carnobacterium gallinarum (DSM 4847) C2c2, Paludibacter propionicigenes (WB4) C2c2, Listeria weihenstephanensis (FSL R9-0317) C2c2, Listeriaceae bacterium (FSL M6-0635) C2c2, Listeria newyorkensis (FSL M6-0635) C2c2, Leptotrichia wadei (F0279) C2c2, Rhodobacter capsulatus (SB 1003) C2c2, Rhodobacter capsulatus (R121) C2c2, Rhodobacter capsulatus (DE442) C2c2, Leptotrichia wadei (Lw2) C2c2, or Listeria seeligeri C2c2.

[0307] In an embodiment of the invention, an accessory protein enhances an activity of a CRISPR protein. In certain embodiments, the accessory protein inhibits an activity of a CRISPR protein.

[0308] According to the invention, naturally occurring accessory proteins of Type II CRISPR systems comprise small proteins encoded at or near a CRISPR locus that function to modify an activity of a CRISPR protein. In general, a CRISPR locus can be identified as comprising a putative CRISPR array and/or encoding a putative CRISPR effector protein. In an embodiment, an effector protein can be from 600 to 2000 amino acids, or from 600 to 1800 amino acids, or from 650 to 1300 amino acids. In an embodiment, an accessory protein can be encoded within 25 kb, or within 20 kb or within 15 kb, or within 10 kb of a putative CRISPR effector protein or array, or from 2 kb to 10 kb from a putative CRISPR effector protein or array.

[0309] In an embodiment of the invention, an accessory protein is from 50 to 300 amino acids, or from 100 to 300 amino acids or from 150 to 250 amino acids or about 200 amino acids.

[0310] Identification and use of a CRISPR accessory protein of the invention is independent of CRISPR effector protein classification. Accessory proteins of the invention can be found in association with or engineered to function with a variety of CRISPR effector proteins. Examples of accessory proteins identified and used herein are representative of CRISPR effector proteins generally. It is understood that CRISPR effector protein classification may involve homology, feature location, nucleic acid target (e.g. DNA or RNA), absence or presence of tracr RNA, location of guide/spacer sequence 5′ or 3′ of a direct repeat, or other criteria. In embodiments of the invention, accessory protein identification and use transcend such classifications.

[0311] According to the invention, in certain embodiments, enhancing activity of a Type II Cas protein or complex thereof comprises contacting the Type II Cas protein or complex thereof with an accessory protein from the same organism that activates the Cas protein. In other embodiments, enhancing activity of a Type II Cas protein of complex thereof comprises contacting the Type II Cas protein or complex thereof with an activator accessory protein from a different organism within the same subclass (e.g., Type II). In other embodiments, enhancing activity of a Type II Cas protein or complex thereof comprises contacting the Type II Cas protein or complex thereof with an accessory protein not within the subclass.

[0312] According to the invention, in certain embodiments, repressing activity of a Type II Cas protein or complex thereof comprises contacting the Type II Cas protein or complex thereof with an accessory protein from the same organism that represses the Cas protein. In other embodiments, repressing activity of a Type II Cas protein or complex thereof comprises contacting the Type II Cas protein or complex thereof with a repressor accessory protein from a different organism within the same subclass (e.g., Type II-D). In other embodiments, repressing activity of a Type II Cas protein or complex thereof comprises contacting the Type II Cas protein or complex thereof with a repressor accessory protein not within the subclass (e.g., a Type II Cas protein other than Type II-B with a Type II-B repressor accessory protein or vice-versa).

[0313] In certain embodiments where the Type II Cas protein and the Type II accessory protein are from the same organism, the two proteins will function together in an engineered CRISPR system. In certain embodiments, it will be desirable to alter the function of the engineered CRISPR system, for example by modifying either or both of the proteins or their expression. In embodiments where the Type II Cas protein and the Type II accessory protein are from different organisms which may be within the same class or different classes, the proteins may function together in an engineered CRISPR system but it will often be desired or necessary to modify either or both of the proteins to function together.

[0314] Accordingly, in certain embodiments of the invention either or both of a Cas protein and an accessory protein may be modified to adjust aspects of protein-protein interactions between the Cas protein and accessory protein. In certain embodiments, either or both of a Cas protein and an accessory protein may be modified to adjust aspects of protein-nucleic acid interactions. Ways to adjust protein-protein interactions and protein-nucleic acid interaction include without limitation, fitting molecular surfaces, polar interactions, hydrogen bonds, and modulating van der Waals interactions. In certain embodiments, adjusting protein-protein interactions or protein-nucleic acid binding comprises increasing or decreasing binding interactions. In certain embodiments, adjusting protein-protein interactions or protein-nucleic acid binding comprises modifications that favor or disfavor a conformation of the protein or nucleic acid.

[0315] By “fitting”, is meant determining including by automatic, or semi-automatic means, interactions between one or more atoms of a Cas protein (and optionally at least one atoms of a Cas accessory protein), or between one or more atoms of a Cas protein and one or more atoms of a nucleic acid (or optionally between one or more atoms of a Cas accessory protein and a nucleic acid), and calculating the extent to which such interactions are stable. Interactions include attraction and repulsion, brought about by charge, steric considerations and the like.

[0316] The three-dimensional structure of Type II CRISPR protein or complex thereof (and/or a Type II CRISPR accessory protein or complex thereof in the context of Casb) provides in the context of the instant invention an additional tool for identifying additional mutations in orthologs of Cas. The crystal structure can also be basis for the design of new and specific Cass (and optionally Cas accessory proteins). Various computer-based methods for fitting are described further. Binding interactions of Cass (and optionally accessory proteins), and nucleic acids can be examined through the use of computer modeling using a docking program. Docking programs are known; for example GRAM, DOCK or AUTODOCK (see Walters et al. Drug Discovery Today, vol. 3, no. 4 (1998), 160-178, and Dunbrack et al. Folding and Design 2 (1997), 27-42). This procedure can include computer fitting to ascertain how well the shape and the chemical structure of the binding partners. Computer-assisted, manual examination of the active site or binding site of a Type II system may be performed. Programs such as GRID (P. Goodford, J. Med. Chem, 1985, 28, 849-57)—a program that determines probable interaction sites between molecules with various functional groups—may also be used to analyze the active site or binding site to predict partial structures of binding compounds. Computer programs can be employed to estimate the attraction, repulsion or steric hindrance of the two binding partners, e.g., components of a Type II CRISPR system, or a nucleic acid molecule and a component of a Type II CRISPR system.

Amino acid substitutions may be made on the basis of differences or similarities in amino acid properties (such as polarity, charge, solubility, hydrophobicity, hydrophilicity, and/or the amphipathic nature of the residues) and it is therefore useful to group amino acids together in functional groups. Amino acids may be grouped together based on the properties of their side chains alone. In comparing orthologs, there are likely to be residues conserved for structural or catalytic reasons. These sets may be described in the form of a Venn diagram (Livingstone C. D. and Barton G. J. (1993) “Protein sequence alignments: a strategy for the hierarchical analysis of residue conservation” Comput. Appl. Biosci. 9: 745-756) (Taylor W. R. (1986) “The classification of amino acid conservation” J. Theor. Biol. 119; 205-218). Conservative substitutions may be made, for example according to the table below which describes a generally accepted Venn diagram grouping of amino acids (see Table 2 below).

TABLE 2

| Set | | Sub-set | |
|---|---|---|---|
| Hydrophobic | F W Y H K M I L V A G C | Aromatic | F W Y H |
| | (SEQ ID NO: 21) | | (SEQ ID NO: 22) |
| | | Aliphatic | I L V |
| Polar | W Y H K R E D C S T N Q | Charged | H K R E D |
| | (SEQ ID NO: 23) | | (SEQ ID NO: 24) |
| | | Positively charged | H K R |
| | | Negatively charged | E D |
| Small | V C A G S P T N D | Tiny | A G S |
| | (SEQ ID NO: 25) | | |

[0317] In some embodiments, the modifications in Cas may comprise modification of one or more amino acid residues of the Cas protein. In some embodiments, the modifications in Cas may comprise modification of one or more amino acid residues located in a region which comprises residues which are positively charged in the unmodified Cas protein (and/or Cas accessory protein). In some embodiments, the modifications in Cas may comprise modification of one or more amino acid residues which are positively charged in the unmodified Cas protein (and/or Cas accessory protein). In some embodiments, the modifications in Cas may comprise modification of one or more amino acid residues which are not positively charged in the unmodified Cas protein (and/or Cas accessory protein). The modification may comprise modification of one or more amino acid residues which are uncharged in the unmodified Cas protein (and/or Cas accessory protein). The modification may comprise modification of one or more amino acid residues which are negatively charged in the unmodified Cas protein (and/or Cas accessory protein). The modification may comprise modification of one or more amino acid residues which are hydrophobic in the unmodified Cas protein (and/or Cas accessory protein). The modification may comprise modification of one or more amino acid residues which are polar in the unmodified Cas protein (and/or Cas accessory protein). The modification may comprise substitution of a hydrophobic amino acid or polar amino acid with a charged amino acid, which can be a negatively charged or positively charged amino acid. The modification may comprise substitution of a negatively charged amino acid with a positively charged or polar or hydrophobic amino acid. The modification may comprise substitution of a positively charged amino acid with a negatively charged or polar or hydrophobic amino acid.

[0318] Embodiments herein also include sequences (both polynucleotide or polypeptide) which may comprise homologous substitution (substitution and replacement are both used herein to mean the interchange of an existing amino acid residue or nucleotide, with an alternative residue or nucleotide) that may occur i.e., like-for-like substitution in the case of amino acids such as basic for basic, acidic for acidic, polar for polar, etc. Non-homologous substitution may also occur i.e., from one class of residue to another or alternatively involving the inclusion of unnatural amino acids such as ornithine (hereinafter referred to as Z), diaminobutyric acid ornithine (hereinafter referred to as B), norleucine ornithine (hereinafter referred to as O), pyridylalanine, thienylalanine, naphthylalanine and phenylglycine. Variant amino acid sequences may include suitable spacer groups that may be inserted between any two amino acid residues of the sequence including alkyl groups such as methyl, ethyl or propyl groups in addition to amino acid spacers such as glycine or β-alanine residues. A further form of variation, which involves the presence of one or more amino acid residues in peptoid form, may be well understood by those skilled in the art. For the avoidance of doubt, “the peptoid form” is used to refer to variant amino acid residues wherein the α-carbon substituent group is on the residue's nitrogen atom rather than the α-carbon. Processes for preparing peptides in the peptoid form are known in the art, for example Simon R J et al., PNAS (1992) 89(20), 9367-9371 and Horwell D C, Trends Biotechnol. (1995) 13(4), 132-134.

[0319] Corresponding residues in other Cas orthologs can be identified by the methods of Zhang et al., 2012 (Nature; 490(7421): 556-60) and Chen et al., 2015 (PLoS Comput Biol; 11(5): e1004248).

### Adaptors and Additional Functional Domains

[0320] In certain embodiments, and as is also described elsewhere herein, the CRISPR-Cas system described herein can include on or more adaptor proteins. In certain embodiments, the adaptor protein can bind to RNA. The adaptor proteins can be capable of recruitment of, for example, effector proteins or fusions that can have one or more functional domains. In some embodiments, one or more proteins of the CRISPR-Cas system, such as a Cas protein can include one or more additional or modified functional domains. In some embodiments, the functional domain is a transcriptional activation domain, preferably VP64. In some embodiments, the functional domain is a transcription repression domain, preferably KRAB. In some embodiments, the transcription repression domain is SID, or concatemers of SID (e.g., SID4X). In some embodiments, the functional domain is an epigenetic modifying domain, such that an epigenetic modifying enzyme is provided. In some embodiments, the functional domain is an activation domain, which may be the P65 activation domain.

[0321] The adaptor proteins may include to orthogonal RNA-binding protein/aptamer combinations that exist within the diversity of bacteriophage coat proteins. A list of such coat proteins includes, but is not limited to: Qβ, F2, GA, fr, JP501, M12, R17, BZ13, JP34, JP500, KU1, M11, MX1, TW18, VK, SP, FI, ID2, NL95, TW19, AP205, ϕCb5, ϕCb8r, ϕCb12r, ϕCb23r, 7s and PRR1.

[0322] The functional domain can be, for example, one or more domains from the group consisting of methylase activity, demethylase activity, transcription activation activity, transcription repression activity, transcription release factor activity, histone modification activity, RNA cleavage activity, DNA cleavage activity, nucleic acid binding activity, and molecular switches (e.g. light inducible). In some embodiments, the functional domain may be selected from the group of: transposase domain, integrase domain, recombinase domain, resolvase domain, invertase domain, protease domain, DNA methyltransferase domain, DNA hydroxylmethylase domain, DNA demethylase domain, histone acetylase domain, histone deacetylases domain, nuclease domain, repressor domain, activator domain, nuclear-localization signal domains, transcription-regulatory protein (or transcription complex recruiting) domain, cellular uptake activity associated domain, nucleic acid binding domain, antibody presentation domain, histone modifying enzymes, recruiter of histone modifying enzymes; inhibitor of histone modifying enzymes, histone methyltransferase, histone demethylase, histone kinase, histone phosphatase, histone ribosylase, histone deribosylase, histone ubiquitinase, histone deubiquitinase, histone biotinase and histone tail protease.

[0323] Endogenous transcriptional repression is often mediated by chromatin modifying enzymes such as histone methyltransferases (HMTs) and deacetylases (HDACs). Repressive histone effector domains are known and an exemplary list is provided below. In the exemplary table, preference was given to proteins and functional truncations of small size to facilitate efficient viral packaging (for instance via AAV). In general, however, the domains may include HDACs, histone methyltransferases (HMTs), and histone acetyltransferase (HAT) inhibitors, as well as HDAC and HMT recruiting proteins. The functional domain may be or include, in some embodiments, THDAC Effector Domains, HDAC Recruiter Effector Domains, Histone Methyltransferase (HMT) Effector Domains, Histone Methyltransferase (TBMT) Recruiter Effector Domains, or Histone Acetyltransferase Inhibitor Effector Domains. Tables 3-7 below show exemplary chromatin modifying enzymes and/or domains.

TABLE 3
HDAC Effector Domains

| | | | | | Full | Selected | Final | |
|---|---|---|---|---|---|---|---|---|
| Subtype/ | | Substrate | Modification | | size | truncation | size | Catalytic |
| Complex | Name | (if known) | (if known) | Organism | (aa) | (aa) | (aa) | domain |
| HDAC I | HDAC8 | — | — | X. laevis | 325 | 1-325 | 325 | 1-272: |
| | | | | | | | | HDAC |
| HDAC I | RPD3 | — | — | S. cerevisiae | 433 | 19-340 | 322 | 19-331: |
| | | | | | | | (Vannier) | HDAC |
| HDAC IV | MesoLo4 | — | — | M. loti | 300 | 1-300 | 300 | — |
| | | | | | | (Gregoretti) | | |
| HDAC IV | HDAC11 | — | — | H. sapiens | 347 | 1-347 (Gao) | 347 | 14-326: |
| | | | | | | | | HDAC |
| HD2 | HDT1 | — | — | A. thaliana | 245 | 1-211 (Wu) | 211 | — |
| SIRT I | SIRT3 | H3K9Ac | — | H. sapiens | 399 | 143-399 | 257 | 126-382: |
| | | H4K16Ac | | | | (Scher) | | SIRT |
| | | H3K56Ac | | | | | | |
| SIRT I | HST2 | — | — | C. albicans | 331 | 1-331 (Hnisz) | 331 | — |
| SIRT I | CobB | — | — | E. coli | 242 | 1-242 | 242 | — |
| | | | | (K12) | | (Landry) | | |
| SIRT I | HST2 | — | — | S. cerevisiae | 357 | 8-298 | 291 | — |
| | | | | | | (Wilson) | | |
| SIRT III | SIRT5 | H4K8Ac | — | H. sapiens | 310 | 37-310 | 274 | 41-309: |
| | | H4K16Ac | | | | (Gertz) | | SIRT |
| SIRT III | Sir2A | — | — | P. | 273 | 1-273 (Zhu) | 273 | 19-273: |
| | | | | falciparum | | | | SIRT |
| SIRT IV | SIRT6 | H3K9Ac | — | H. sapiens | 355 | 1-289 | 289 | 35-274: |
| | | H3K56Ac | | | | (Tennen) | | SIRT |

[0324] Accordingly, the repressor domains of the present invention may be selected from histone methyltransferases (TINMTs), histone deacetylases (TIDACs), histone acetyltransferase (HAT) inhibitors, as well as TIDAC and UN/T recruiting proteins.

[0325] The TIDAC domain may be any of those in the table above, namely: THDAC8, RPD3, MesoLo4, THDAC11, HIDT1, SJRT3, HST2, CobB, HST2, SJRT5, Sir2A, or SJRT6.

TABLE 4

| | | | Modi- | | | | | |
|---|---|---|---|---|---|---|---|---|
| | | Substrate | fication | | Full | Selected | Final | |
| Subtype/ | | (if | (if | | size | truncation | size | Catalytic |
| Complex | Name | known) | known) | Organism | (aa) | (aa) | (aa) | domain |
| Sin3a | MeCP2 | — | — | R. norvegicus | 492 | 207-492 (Nan) | 286 | — |
| Sin3a | MBD2b | — | — | H. sapiens | 262 | 45-262 | 218 | — |
| | | | | | | (Boeke) | | |
| Sin3a | Sin3a | — | — | H. sapiens | 1273 | 524-851 | 328 | 627-829: |
| | | | | | | (Laherty) | | HDAC1 |
| | | | | | | | | interaction |
| NcoR | NcoR | — | — | H. sapiens | 2440 | 420-488 | 69 | — |
| | | | | | | (Zhang) | | |
| NuRD | SALL1 | — | — | M. musculus | 1322 | 1-93 | 93 | — |
| | | | | | | (Lauberth) | | |
| CoREST | RCOR1 | — | — | H. sapiens | 482 | 81-300 (Gu, | 220 | — |
| | | | | | | Ouyang) | | |

[0326] In some embodiments, the functional domain may be a HDAC Recruiter Effector Domain. Preferred examples include those in the Table(s) below, namely MeCP2, MBD2b, Sin3a, NcoR, SALL1, RCOR1. NcoR is exemplified in the present Examples and, although preferred, it is envisaged that others in the class will also be useful.

[0327] In some embodiments, the functional domain may be a Methyltransferase (HMT) Effector Domain. Preferred examples include those in the Table(s) below, namely NUE, vSET, EHMT2/G9A, SUV39H1, dim-5, KYP, SUVR4, SET4, SET1, SETD8, and TgSET8. NUE is exemplified in the present Examples and, although preferred, it is envisaged that others in the class will also be useful.

TABLE 5

| | | Substrate | Modifi- | | Full | Selected | Final | |
|---|---|---|---|---|---|---|---|---|
| Subtype/ | | (if | cation (if | | size | truncation | size | Catalytic |
| Complex | Name | known) | known) | Organism | (aa) | (aa) | (aa) | domain |
| SET | NUE | H2B, | — | C. trachomatis | 219 | 1-219 | 219 | — |
| | | H3, H4 | | | | (Pennini) | | |
| SET | vSET | — | H3K27me3 | P. bursaria | 119 | 1-119 | 119 | 4-112: SET2 |
| | | | | chlorella virus | | (Mujtaba) | | |
| SUV39 | EHMT2/ | H1.4K2, | H3K9me1/ | M. musculus | 1263 | 969-1263 | 295 | 1025-1233: |
| family | G9A | H3K9, | 2, | | | (Tachibana) | | preSET, SET, |
| | | H3K27 | H1K25me1 | | | | | postSET |
| SUV39 | SUV39H1 | — | H3K9me2/ | H. sapiens | 412 | 79-412 | 334 | 172-412: |
| | | | 3 | | | (Snowden) | | preSET, SET, |
| | | | | | | | | postSET |
| Suvar3-9 | dim-5 | — | H3K9me3 | N. crassa | 331 | 1-331 | 331 | 77-331: |
| | | | | | | (Rathert) | | preSET, SET, |
| | | | | | | | | postSET |
| Suvar3-9 | KYP | — | H3K9me1/ | A. thaliana | 624 | 335-601 | 267 | — |
| (SUVH | | | 2 | | | | (Jackson) | |
| subfamily) | | | | | | | | |
| Suvar3-9 | SUVR4 | H3K9me1 | H3K9me2/ | A. thaliana | 492 | 180-492 | 313 | 192-462: |
| (SUVR | | | 3 | | | | (Thorst | preSET, SET, |
| subfamily) | | | | | | | ensen) | postSET |
| Suvar4- | SET4 | — | H4K20me3 | C. elegans | 288 | 1-288 | 288 | — |
| 20 | | | | | | (Vielle) | | |
| SET8 | SET1 | — | H4K20me1 | C. elegans | 242 | 1-242 | 242 | — |
| | | | | | | (Vielle) | | |
| SET8 | SETD8 | — | H4K20me1 | H. sapiens | 393 | 185-393 | 209 | 256-382: SET |
| | | | | | | | (Couture) | |
| SET8 | TgSET8 | — | H4K20me1/ | T. gondii | 1893 | 1590-1893 | 304 | 1749-1884: |
| | | | 2/3 | | | (Sautel) | | SET |

[0328] In some embodiments, the functional domain may be a Histone Methyltransferase (HMT) Recruiter Effector Domain. Preferred examples include those in the Table below, namely Hp1a, PHF19, and NIPP1.

TABLE 6
Histone Methyltransferase (HMT) Recruiter Effector Domains

| | | Substrate | Modification | | Full | Selected | | |
|---|---|---|---|---|---|---|---|---|
| Subtype/ | | (if | (if | | size | truncation | Final size | Catalytic |
| Complex | Name | known) | known) | Organism | (aa) | (aa) | (aa) | domain |
| — | Hp1a | — | H3K9me3 | M. | 191 | 73-191 | 119 | 121-179: |
| | | | | musculus | | | (Hathaway) | chromoshadow |
| — | PHF19 | — | H3K27me3 | H. sapiens | 580 | (1-250) + | 335 | 163-250: |
| | | | | | | GGSG | (Ballaré) | PHD2 |
| | | | | | | linker + | | |
| | | | | | | (500-580) | | |
| — | NIPP1 | — | H3K27me3 | H. sapiens | 351 | 1-329 | 329 | 310-329: EED |
| | | | | | | (Jin) | | |

[0329] In some embodiments, the functional domain may be Histone Acetyltransferase Inhibitor Effector Domain. Preferred examples include SET/TAF-10 listed in the Table below.

TABLE 7
Histone Acetyltransferase Inhibitor Effector Domains

| | | Substrate | | | Full | Selected | Final | |
|---|---|---|---|---|---|---|---|---|
| Subtype/ | | (if | Modification | | size | truncation | size | Catalytic |
| Complex | Name | known) | (if known) | Organism | (aa) | (aa) | (aa) | domain |
| — | SET/T | — | — | M. | 289 | 1-289 | 289 | — |
| | AF-1β | | | musculus | | (Cervoni) | | |

[0330] It is also preferred to target endogenous (regulatory) control elements (such as enhancers and silencers) in addition to a promoter or promoter-proximal elements. Thus, the invention can also be used to target endogenous control elements (including enhancers and silencers) in addition to targeting of the promoter. These control elements can be located upstream and downstream of the transcriptional start site (TSS), starting from 200 bp from the TSS to 100 kb away. Targeting of known control elements can be used to activate or repress the gene of interest. In some cases, a single control element can influence the transcription of multiple target genes. Targeting of a single control element could therefore be used to control the transcription of multiple genes simultaneously.

[0331] Targeting of putative control elements on the other hand (e.g. by tiling the region of the putative control element as well as 200 bp up to 100 kB around the element) can be used as a means to verify such elements (by measuring the transcription of the gene of interest) or to detect novel control elements (e.g. by tiling 100 kb upstream and downstream of the TSS of the gene of interest). In addition, targeting of putative control elements can be useful in the context of understanding genetic causes of disease. Many mutations and common SNP variants associated with disease phenotypes are located outside coding regions. Targeting of such regions with either the activation or repression systems described herein can be followed by readout of transcription of either a) a set of putative targets (e.g. a set of genes located in closest proximity to the control element) or b) whole-transcriptome readout by e.g. RNAseq or microarray. This would allow for the identification of likely candidate genes involved in the disease phenotype. Such candidate genes could be useful as novel drug targets.

[0332] Histone acetyltransferase (HAT) inhibitors are mentioned herein. However, an alternative in some embodiments is for the one or more functional domains to comprise an acetyltransferase, preferably a histone acetyltransferase. These are useful in the field of epigenomics, for example in methods of interrogating the epigenome. Methods of interrogating the epigenome may include, for example, targeting epigenomic sequences. Targeting epigenomic sequences may include the guide being directed to an epigenomic target sequence. Epigenomic target sequence may include, in some embodiments, include a promoter, silencer or an enhancer sequence.

[0333] Histone modifying domains are also preferred in some embodiments. Exemplary histone modifying domains are discussed elsewhere herein. Transposase domains, HR (Homologous Recombination) machinery domains, recombinase domains, and/or integrase domains are also preferred as the present functional domains. In some embodiments, DNA integration activity includes HR machinery domains, integrase domains, recombinase domains and/or transposase domains. Histone acetyltransferases are preferred in some embodiments.

[0334] In some embodiments, the DNA cleavage activity is due to a nuclease. In some embodiments, the nuclease comprises a Fok1 nuclease. See, “Dimeric CRISPR RNA-guided FokI nucleases for highly specific genome editing”, Shengdar Q. Tsai, Nicolas Wyvekens, Cyd Khayter, Jennifer A. Foden, Vishal Thapar, Deepak Reyon, Mathew J. Goodwin, Martin J. Aryee, J. Keith Joung Nature Biotechnology 32(6): 569-77 (2014), relates to dimeric RNA-guided FokI Nucleases that recognize extended sequences and can edit endogenous genes with high efficiencies in human cells.

[0335] In some preferred embodiments, the functional domain is a transcriptional activation domain, such as, without limitation, VP64, p65, MyoD1, HSF1, RTA, SET7/9 or a histone acetyltransferase. In some embodiments, the functional domain is a transcription repression domain, preferably KRAB. In some embodiments, the transcription repression domain is SID, or concatemers of SID (e.g. SID4X). In some embodiments, the functional domain is an epigenetic modifying domain, such that an epigenetic modifying enzyme is provided. In some embodiments, it is advantageous that additionally at least one NLS is provided. In some instances, it is advantageous to position the NLS at the N terminus. When more than one functional domain is included, the functional domains may be the same or different. Positioning the functional domain in the RuvC domain, a Rec1 domain (when present), a Rec2 domain (when present), the HNH domain, or a PI domain of the Cas protein or any ortholog corresponding to these domains can be advantageous in an adaptor or accessory protein; and again, it is mentioned that the functional domain can be a DD. Positioning of the functional domains in a Rec domain or a Rec2 domain, of the Cas protein or any ortholog corresponding to these domains, in some instances may be preferred. Positioning of the functional domains in the Rec domain at position 553, Rec domain at 575, the Rec2 domain at any position of 175-306 or replacement thereof with reference to an spCas9, the HNH domain at any position of 715-901 or replacement thereof with reference to spCas9, or the PI domain at position 1153 with a reference to a SpCas9 protein or any ortholog corresponding to these domains or corresponding positions, in some instances may be preferred. Fok1 functional domain may be attached at the N terminus. When more than one functional domain is included, the functional domains may be the same or different.

[0336] The adaptor protein may be any number of proteins that binds to an aptamer or recognition site introduced into a modified nucleic acid component and which allows proper positioning of one or more functional domains, once the nucleic acid component has been incorporated into the CRISPR complex, to affect the target with the attributed function. As explained in detail in this application such may be coat proteins, preferably bacteriophage coat proteins. The functional domains associated with such adaptor proteins (e.g., in the form of fusion protein) may include, for example, one or more domains from the group consisting of methylase activity, demethylase activity, transcription activation activity, transcription repression activity, transcription release factor activity, histone modification activity, RNA cleavage activity, DNA cleavage activity, nucleic acid binding activity, and molecular switches (e.g. light inducible). Preferred domains are Fok1, VP64, P65, HSF1, MyoD1. In the event that the functional domain is a transcription activator or transcription repressor it is advantageous that additionally at least an NLS is provided and preferably at the N terminus. When more than one functional domain is included, the functional domains may be the same or different. The adaptor protein may utilize known linkers to attach such functional domains. The adaptor protein may utilize known linkers to attach such functional domains. Such linkers may be used to associate the AAV (e.g., capsid or VP2) with the CRISPR enzyme or have the CRISPR enzyme comprise the AAV (or vice versa).

[0337] Attachment of a functional domain or fusion protein can be via a linker, e.g., a flexible glycine-serine or a rigid alpha-helical linker such as (Ala(GluAlaAlaAlaLys)Ala) (SEQ ID NO: 26). Such linkers are described elsewhere herein. Alternative linkers are available, but highly flexible linkers are thought to work best to allow for maximum opportunity for the 2 parts of the Cas to come together and thus reconstitute Cas activity. One alternative is that the NLS of nucleoplasmin can be used as a linker. For example, a linker can also be used between the Cas and any functional domain. Again, a (GGGGS)₃ (SEQ ID NO: 1) linker may be used here (or the 6, 9, or 12 repeat versions therefore) or the NLS of nucleoplasmin can be used as a linker between Cas and the functional domain.

### Other Accessory Molecules

[0338] In some embodiments, and as described in greater detail elsewhere herein, one or more of the polypeptides of the nucleic acid targeting system described herein can be configured for expression and/or delivery via an AAV. As such one or more of the polypeptides of the nucleic acid targeting system described herein can be provided as an AAV-CRISPR enzyme. In some embodiments, one or more of the AAV-CRISPR enzyme is part of a complexed with one or more polynucleotides (e.g., nucleic acid components described herein, repair templates, etc. described herein).

[0339] In some embodiments, an AAV-CRISPR enzyme includes one or more nuclear localization sequences and/or NES (nuclear export sequences). In some embodiments, said AAV-CRISPR enzyme includes a regulatory element that drives transcription of component(s) of the CRISPR system (e.g., RNA, such as guide RNA and/or HR template nucleic acid molecule) in a eukaryotic cell such that said AAV-CRISPR enzyme delivers the CRISPR system accumulates in a detectable amount in the nucleus of the eukaryotic cell and/or is exported from the nucleus. In some embodiments, the regulatory element is a polymerase II promoter. In some embodiments, the AAV-CRISPR enzyme is a type II AAV-CRISPR system enzyme. In some embodiments, the AAV-CRISPR enzyme is an AAV-Cas enzyme. In some embodiments, the AAV-Cas enzyme is derived from S. pneumoniae, S. pyogenes, S. thermophilus, F. novicida or S. aureus Type II-D Cas (e.g., modified to have or be associated with at least one AAV), and may include further alteration or mutation of the Type II-D Cas, and can be a chimeric Type II-D Cas. In some embodiments, the AAV-CRISPR enzyme is codon-optimized for expression in a eukaryotic cell. In some embodiments, the AAV-CRISPR enzyme directs cleavage of one or two strands at the location of the target sequence. In some embodiments, the AAV-CRISPR enzyme lacks or substantially DNA strand cleavage activity (e.g., no more than 5% nuclease activity as compared with a wild type enzyme or enzyme not having the mutation or alteration that decreases nuclease activity). In some embodiments, the first regulatory element is a polymerase III promoter. In some embodiments, the second regulatory element is a polymerase II promoter. In some embodiments, the guide sequence is at least 15, 16, 17, 18, 19, 20, 25 nucleotides, or between 10-30, or between 15-25, or between 15-20 nucleotides in length.

[0340] With respect to the AAV-CRISPR enzyme described herein the CRISPR enzyme component can be a mutant (e.g., a Cas mutant as described elsewhere herein). In embodiments, when the CRISPR enzyme is not SpCas9 (e.g., is Cas (e.g., Type II-D Cas), mutations may be made at any or all residues corresponding to positions 10, 762, 840, 854, 863 and/or 986 of SpCas9 (which may be ascertained for instance by standard sequence comparison tools). In particular, any or all of the following mutations are preferred in Type II-D Cas: D10A, E762A, H840A, N854A, N863A and/or D986A; as well as conservative substitution for any of the replacement amino acids is also envisaged. Corresponding positions in Type II-D Cas will be appreciated in view of the description herein and sequence and/or protein analysis techniques generally known in the art. In some embodiments, the Type II-D AAV-CRISPR enzyme comprises at least one or more, or at least two or more mutations, wherein the at least one or more mutation or the at least two or more mutations is as to D10, E762, H840, N854, N863, or D986 according to or corresponding to SpCas9 protein, e.g., D10A, E762A, H840A, N854A, N863A and/or D986A as to SpCas9, or N580 according to SaCas9 or SaCas9-like, e.g., N580A as to SaCas9, or any corresponding mutation(s) in a Cas9 of an ortholog to Sp or Sa, or the Type II-D CRISPR enzyme comprises at least one mutation wherein at least H840 or N863A as to SpCas9 or N580A as to SaCas9 is mutated; e.g., wherein the CRISPR enzyme comprises H840A, or D10A and H840A, or D10A and N863A, according to SpCas9 protein, or any corresponding mutation(s) in a Cas9 or of an ortholog to Sp protein or Sa protein.

[0341] In an embodiment of the invention the Type II-D AAV-CRISPR enzyme comprises one or two or more mutations in a residue selected from the group comprising, consisting essentially of, or consisting of D10, E762, H840, N854, N863, or D986 with reference to an SpCas9. In a further embodiment the Type II-D AAV-CRISPR enzyme comprises one or two or more mutations selected from the group comprising D10A, E762A, H840A, N854A, N863A or D986A with reference to an SpCas9. In another embodiment, the functional domain comprises, consist essentially of a transcriptional activation domain, e.g., VP64 with reference to an SpCas9. In another embodiment, the functional domain comprises, consist essentially of a transcriptional repressor domain, e.g., KRAB domain, SID domain or a SID4X domain. In embodiments of the invention, the one or more heterologous functional domains have one or more activities selected from the group comprising, consisting essentially of, or consisting of methylase activity, demethylase activity, transcription activation activity, transcription repression activity, transcription release factor activity, histone modification activity, RNA cleavage activity and nucleic acid binding activity. In further embodiments of the invention the cell is a eukaryotic cell or a mammalian cell or a human cell. In further embodiments, the adaptor protein is selected from the group comprising, consisting essentially of, or consisting of MS2, PP7, Qβ, F2, GA, fr, JP501, M12, R17, BZ13, JP34, JP500, KU1, M11, MX1, TW18, VK, SP, FI, ID2, NL95, TW19, AP205, ϕCb5, ϕCb8r, ϕCb12r, ϕCb23r, 7s, PRR1. In another embodiment, the at least one loop of the sgRNA is tetraloop and/or loop2.

[0342] Further, the AAV-CRISPR enzyme with diminished nuclease activity is most effective when the nuclease activity is inactivated (e.g., nuclease inactivation of at least 70%, at least 80%, at least 90%, at least 95%, at least 97%, or 100% as compared with the wild type enzyme; or to put in another way, a AAV-Cas enzyme or AAV-CRISPR enzyme having advantageously about 0% of the nuclease activity of the non-mutated or wild type Cas enzyme or CRISPR enzyme, or no more than about 3% or about 5% or about 10% of the nuclease activity of the non-mutated or wild type Cas enzyme or CRISPR enzyme). This is possible by introducing mutations into the RuvC and HNH nuclease domains of the SpCas protein (e.g. SpCas9 or SpCas12) and orthologs thereof. For example, utilizing mutations in a residue selected from the group comprising, consisting essentially of, or consisting of D10, E762, H840, N854, N863, or D986 and more preferably introducing one or more of the mutations selected from the group comprising, consisting essentially of, or consisting of D10A, E762A, H840A, N854A, N863A or D986A. A preferable pair of mutations is D10A with H840A, more preferable is D10A with N863A with reference to SpCas9 and orthologs thereof.

### Modulators of DSB Repair Mechanisms

[0343] CRISPR-Cas systems typically evoke a double strand break repair mechanism in modifying a polynucleotide (see e.g., Yang et al., 2020. Int. J. Mol. Sci. 21:6461) In some embodiments, one or more Cas proteins of the CRISPR-Cas system is fused to, coupled to, or otherwise associated with one or more accessory molecules that can promote or inhibit/minimize one or more endogenous double strand break mechanisms of the cell (e.g., HDR (homology directed repair) and/or NHEJ (non-homologous end joining)). In some embodiments, HDR can be enhanced by minimizing NHEJ and/or stimulating HDR. See e.g., Yang et al., 2020. Int. J. Mol. Sci. 21:646, particularly at Section 4, pages 8-12 and Table 1. In some embodiments NEHJ can be reduced or minimized by fusing, coupling, or otherwise associating one or more of the Cas proteins within the CRISRP-Cas systems of the present invention described in greater detail elsewhere herein with Lambda Gam and/or other NHEJ inhibitors and/or HDR activators or active domain(s) thereof. Other NHEJ inhibitors are generally known in the art which can be suitable for use in a similar fashion to Lambda Gam in the present invention.

[0344] In some embodiments, the NHEJ inhibitor(s) and/or HDR activator(s) can be attached to the Cas protein via a linker at one or more sites on the Cas protein. Suitable attachment sites and chemistries are demonstrated in relation to Cas9 as shown in e.g., FIGS. 15A-15D and related discussion within International Patent Publication No. WO 2019135816, which show e.g. (FIG. 15A) a crystal structure showing potential sites for engineered cysteines on Cas9; (FIG. 15B) a schematic showing an example of SynGEM (left) with possible conjugation chemistries (right); (FIG. 15C) a diagram showing structures and potential linker attachment sites for known NHEJ inhibitors and HDR activator; and (FIG. 15D) a diagram showing a reported scaffold for multivalent display of NHEJ inhibitors or HDR activators on Cas9, all of which may be adapted for use with the Type II-D Cas proteins of the present invention. Homologous attachment positions in other Cas proteins can be appreciated in view of this description and can be used to attach an NHEJ inhibitor and/or HDR activator on Cas proteins other than Cas 9. The conjugation can be effected via cysteines, sortase, or using unnatural amino acids bearing tetrazine or acetylphenyl alanine. See also International Application WO 2019135816 at Working Examples 6-8. In some embodiments, the attachment site for the linker comprises or is modified to comprise an aryl ring.

[0345] In some embodiments, the DSB repair mechanism modulator(s) is/are directly attached to or coupled to via a linker to a Cas of the CRISPR-Cas system (including but not limited to a small Type II-D Cas protein or variant described in greater detail elsewhere herein). As used herein, “attached” refers to covalent or non-covalent interaction between two or more molecules. Non-covalent interactions can include ionic bonds, electrostatic interactions, van der Walls forces, dipole-dipole interactions, dipole-induced-dipole interactions, London dispersion forces, hydrogen bonding, halogen bonding, electromagnetic interactions, π-π interactions, cation-π interactions, anion-π interactions, polar π-interactions, and hydrophobic effects. In some embodiments, the attachment is a covalent attachment. In some embodiments, the attachment is a non-covalent attachment. In some embodiments, the donor/insert polynucleotide can be attached via chemical linker such as any of those described in e.g., International Application Publication WO 2019135816. In some embodiments, a linker or other tether can be used to couple the donor polynucleotide to a Cas protein or other CRISPR-Cas system component. In some embodiments, attachment (direct or via a linker or other tether) occurs at one or more sites in the Cas protein, such as any of those shown in or homologous to those shown in FIG. 15A of International Application Publication WO 2019135816. In some embodiments, attachment (direct or via a linker or other tether) of the donor polynucleotide is at any one or more residues E1207, S1154, S1116, S355, E471, E1068, E945, E1026, Q674, E532, K558, S204, Q826, D435, S867 relative to a Cas9 or a homologue thereof in another Cas protein.

[0346] In some embodiments, one or more NEJH inhibitors and one or more HDR activators are attached or coupled to the same Cas protein.

[0347] In some embodiments, the linker used to couple the NHEJ inhibitor and/or HDR activator is a cleavable or biodegradable linker. In some embodiments, the linker is an inducible linker, a switchable linker, a chemical linker, a PEG linker, a functionalized inker, or a GlySar linker.

[0348] In some embodiments the linkers are non-functionalized or functionalized PEG linkers (alkyne, azide, cyclooctyne etc.) that are commercially available can be employed for conjugation of NHEJ inhibitors at the [symbol] ≥position.

[0349] International Application WO 2019135816 also describes objective tests to determine if attachment and/or incorporation of an NHEJ inhibitor and/or HDR activator is successful and can be used to determine if compositions of the present invention are effective.

### Design of CRISPR-Cas Systems

[0350] In a further embodiments, the invention involves a computer-assisted method for identifying or designing potential compounds to fit within or bind to CRISPR-Cas system or a functional portion thereof or vice versa (a computer-assisted method for identifying or designing potential CRISPR-Cas systems or a functional portion thereof for binding to desired compounds) or a computer-assisted method for identifying or designing potential CRISPR-Cas systems (e.g., with regard to predicting areas of the CRISPR-Cas system to be able to be manipulated—for instance, based on crystal structure data or based on data of Cas orthologs, or with respect to where a functional group such as an activator or repressor can be attached to the CRISPR-Cas system, or as to Cas truncations or as to designing nickases), said method including:
[0351] using a computer system, e.g., a programmed computer comprising a processor, a data storage system, an input device, and an output device, the steps of:
[0352] (a) inputting into the programmed computer through said input device data comprising the three-dimensional co-ordinates of a subset of the atoms from or pertaining to the CRISPR-Cas crystal structure (e.g. a CRISPR-Cas crystal structure), e.g., in the CRISPR-Cas system binding domain or alternatively or additionally in domains that vary based on variance among Cas orthologs or as to e.g. Type II-D Cas or as to nickases or as to functional groups, optionally with structural information from CRISPR-Cas system complex(es), thereby generating a data set;
[0353] (b) comparing, using said processor, said data set to a computer database of structures stored in said computer data storage system, e.g., structures of compounds that bind or putatively bind or that are desired to bind to a CRISPR-Cas system or as to Cas orthologs (e.g., as Type II-D Cas or as to domains or regions that vary amongst Cas orthologs) or as to the CRISPR-Cas crystal structure or as to nickases or as to functional groups;
[0354] (c) selecting from said database, using computer methods, structure(s)—e.g., CRISPR-Cas structures that may bind to desired structures, desired structures that may bind to certain CRISPR-Cas structures, portions of the CRISPR-Cas system that may be manipulated, e.g., based on data from other portions of the CRISPR-Cas crystal structure and/or from Cas orthologs, truncated Cas, novel nickases or particular functional groups, or positions for attaching functional groups or functional-group-CRISPR-Cas systems;
[0355] (d) constructing, using computer methods, a model of the selected structure(s); and
[0356] (e) outputting to said output device the selected structure(s);
   and optionally synthesizing one or more of the selected structure(s);
   and further optionally testing said synthesized selected structure(s) as or in a CRISPR-Cas system;
   or, said method comprising: providing the co-ordinates of at least two atoms of the CRISPR-Cas crystal structure, e.g., at least two atoms of the herein Crystal Structure Table of the CRISPR-Cas crystal structure or co-ordinates of at least a sub-domain of the CRISPR-Cas crystal structure (“selected co-ordinates”), providing the structure of a candidate comprising a binding molecule or of portions of the CRISPR-Cas system that may be manipulated, e.g., based on data from other portions of the CRISPR-Cas crystal structure and/or from Cas orthologs, or the structure of functional groups, and fitting the structure of the candidate to the selected co-ordinates, to thereby obtain product data comprising CRISPR-Cas structures that may bind to desired structures, desired structures that may bind to certain CRISPR-Cas structures, portions of the CRISPR-Cas system that may be manipulated, truncated Cas, novel nickases, or particular functional groups, or positions for attaching functional groups or functional-group-CRISPR-Cas systems, with output thereof, and optionally synthesizing compound(s) from said product data and further optionally comprising testing said synthesized compound(s) as or in a CRISPR-Cas system.

[0357] The testing can include analyzing the CRISPR-Cas system resulting from said synthesized selected structure(s), e.g., with respect to binding, or performing a desired function.

[0358] The output in the foregoing methods can comprise data transmission, e.g., transmission of information via telecommunication, telephone, video conference, mass communication, e.g., presentation such as a computer presentation (e.g. POWERPOINT), internet, email, documentary communication such as a computer program (e.g. WORD) document and the like. Accordingly, the invention also comprehends computer readable media containing: atomic co-ordinate data according to the herein-referenced Crystal Structure, said data defining the three-dimensional structure of CRISPR-Cas or at least one sub-domain thereof, or structure factor data for CRISPR-Cas, said structure factor data being derivable from the atomic co-ordinate data of herein-referenced Crystal Structure. The computer readable media can also contain any data of the foregoing methods. The invention further comprehends methods a computer system for generating or performing rational design as in the foregoing methods containing either: atomic co-ordinate data according to herein-referenced Crystal Structure, said data defining the three-dimensional structure of CRISPR-Cas or at least one sub-domain thereof, or structure factor data for CRISPR-Cas, said structure factor data being derivable from the atomic co-ordinate data of herein-referenced Crystal Structure. The invention further comprehends a method of doing business comprising providing to a user the computer system or the media or the three-dimensional structure of CRISPR-Cas or at least one sub-domain thereof, or structure factor data for CRISPR-Cas, said structure set forth in and said structure factor data being derivable from the atomic co-ordinate data of herein-referenced Crystal Structure, or the herein computer media or a herein data transmission.

[0359] A “binding site” or an “active site” comprises or consists essentially of or consists of a site (such as an atom, a functional group of an amino acid residue or a plurality of such atoms and/or groups) in a binding cavity or region, which may bind to a compound such as a nucleic acid molecule, which is/are involved in binding.

[0360] By “fitting” is meant determining by automatic, or semi-automatic means, interactions between one or more atoms of a candidate molecule and at least one atom of a structure of the invention and calculating the extent to which such interactions are stable. Interactions include attraction and repulsion, brought about by charge, steric considerations and the like. Various computer-based methods for fitting are described further

[0361] By “root mean square (or rms) deviation”, refers to the square root of the arithmetic mean of the squares of the deviations from the mean.

[0362] By a “computer system”, is meant the hardware means, software means and data storage means used to analyze atomic coordinate data. The minimum hardware means of the computer-based systems of the present invention typically comprises a central processing unit (CPU), input means, output means and data storage means. Desirably a display or monitor is provided to visualize structure data. The data storage means may be RAM or means for accessing computer readable media of the invention. Examples of such systems are computer and tablet devices running Unix, Windows or Apple operating systems.

[0363] By “computer readable media”, is meant any medium or media, which can be read and accessed directly or indirectly by a computer e.g., so that the media is suitable for use in the above-mentioned computer system. Such media include, but are not limited to: magnetic storage media such as floppy discs, hard disc storage medium and magnetic tape; optical storage media such as optical discs or CD-ROM; electrical storage media such as RAM and ROM; thumb drive devices; cloud storage devices and hybrids of these categories such as magnetic/optical storage media.

[0364] The invention comprehends the use of the protected guides described herein above in the optimized functional CRISPR-Cas enzyme systems described herein.

### Optimizing Efficacy of the CRISPR-Cas Systems

[0365] The CRISPR-Cas systems described herein can be optimized for efficacy. Such design strategies can take into consideration, for example, the Cas effector activity, guide polynucleotide activity, and on/off target activity.

### Selection of a Most Active Enzyme

### Enzyme Stability

[0366] The level of expression of a protein is dependent on many factors, including the quantity of mRNA, its stability and rates of ribosome initiation. The stability or degradation of mRNA is an important factor. Several strategies have been described to increase mRNA stability. One aspect is codon-optimization. It has been found that GC-rich genes are expressed several-fold to over a 100-fold more efficiently than their GC-poor counterparts. This effect could be directly attributed to increased steady-state mRNA levels, and more particularly to efficient transcription or mRNA processing (not decreased degradation) (Kudla et al. Plos Biology http://dx.doi.org/10.1371/journal.pbio.0040180). Also, it has been found that ribosomal density has a significant effect on the transcript half-life. More particularly, it was found that an increase in stability can be achieved through the incorporation of nucleotide sequences that are capable of forming secondary structures, which often recruit ribosomes, which impede mRNA degrading enzymes. WO2011/141027 describes that slowly-read codons can be positioned in such a way as to cause high ribosome occupancy across a critical region of the 5′ end of the mRNA can increase the half-life of a message by as much as 25%, and produce a similar uplift in protein production. In contrast, positioning even a single slow-read codon before this critical region can significantly destabilize the mRNA and result in an attenuation of protein expression. This understanding enables the design of mRNAs so as to suit the desired functionality. In addition, chemical modifications such as those described for guide sequences herein can be envisaged to increase mRNA stability.

### Selection of a Most Active Guide

### Guide Stability

[0367] Guide stability can be altered to increase or decrease the efficacy or efficiency of the CRISPR-Cas system. Chemical modification of the guide polynucleotides can alter the stability of the guide polynucleotides. The guide polynucleotides can be designed to achieve a desired stability by the incorporation of chemically modified nucleotides. In certain embodiments, the gRNA(s) incorporated in the CRISPR-Cas system can be chemically modified guide RNAs. Examples of guide RNA chemical modifications include, without limitation, incorporation of 2′-O-methyl (M), 2′-O-methyl 3′phosphorothioate (MS), or 2′-O-methyl 3′thioPACE (MSP) at one or more terminal nucleotides. Such chemically modified guide RNAs can comprise increased stability and increased activity as compared to unmodified guide RNAs, though on-target vs. off-target specificity is not predictable. (See, Hendel, 2015, Nat Biotechnol. 33(9):985-9, doi: 10.1038/nbt.3290, published online 29 Jun. 2015). Chemically modified guide RNAs further include, without limitation, RNAs with phosphorothioate linkages and locked nucleic acid (LNA) nucleotides comprising a methylene bridge between the 2′ and 4′ carbons of the ribose ring.

[0368] Rahdar et al. describe methods to ensure stabilization in the tracer hybridization region (Proc Natl Acad Sci USA. 2015, 22; 112(51):E7110-7. doi: 10.1073). Such methods can be adapted for use in designing a CRISPR-Cas system described herein.

### Select Best Target Site in Gene

[0369] Studies to date suggest that while sgRNA activity can be quite high, there is significant variability among sgRNAs in their ability to generate the desired target cleavage. Efforts have been made to identify design criteria to maximize guide RNA efficacy. Doench et al. (Nat Biotechnol. 2014 December; 32(12): 1262-1267 and Nat Biotechnol. PubMed PMID: 26780180) describe the development of a quantitative model to optimize sgRNA activity prediction, and a tool to use this model for sgRNA design. Accordingly, in particular embodiments, the methods provided herein can include identifying an optimal guide sequence based on a statistical comparison of active guide RNAs, such as described by Doench et al. (above). In particular embodiments, at least five gRNAs are designed per target and these are tested empirically in cells to generate at least one which has sufficiently high activity.

### Identification of Suitable Guide Sequence

[0370] Currently RNA guides are designed using the reference human genome; however, failing to take into account variation in the human population may confound the therapeutic outcome for a given RNA guide. The recently released ExAC dataset, based on 60,706 individuals, contains on average one variant per eight nucleotides in the human exome (Lek, M. et al. Nature 536, 285-291 (2016)). This highlights the potential for genetic variation to impact the efficacy of certain RNA guides across patient populations for CRISPR-based gene therapy, due to the presence of mismatches between the RNA guide and variants present in the target site of specific patients. To assess this impact, the ExAC dataset was used and can be used to catalog variants present in all possible targets in the human reference exome that either (i) disrupt the target PAM sequence or (ii) introduce mismatches between the RNA guide and the genomic DNA, which can collectively be termed target variation. For treatment of a patient population, avoiding target variation for RNA guides administered to individual patients will maximize the consistency of outcomes for a genome editing therapeutic.

[0371] In some embodiments, the CRISPR-Cas system can include RNA guide(s) for platinum targets. This can, in some embodiments, achieve targeting for 99.99% of patients. In some embodiments, these RNA guides can be further selected to minimize the number of off-target candidates occurring on high frequency haplotypes in the patient population (discussed elsewhere herein). In some embodiments, low frequency variation captured in large scale sequencing datasets can be used to estimate the number of guide RNA-enzyme combinations required to effectively and safely treat different sizes of patient populations. In some embodiments, pre-therapeutic whole genome sequencing of individual patients can be completed and analyzed to select an optimal guide RNA-Cas enzyme combination for treatment of a specific patient or patient population. In some embodiments, the selected guide RNA-Cas enzyme combination can be a perfect match to the patient's genome. In some embodiments, the selected guide RNA-Cas enzyme combination can be free of patient-specific off-target candidates. This framework can also be used, in some embodiments, in combination with additional human sequencing data, which can further refine these selection criteria and can allow for the design and validation of genome editing therapeutics while minimizing both the number of guide RNA-enzyme combinations necessary for approval and the cost of delivering effective and safe gene therapies to patients.

[0372] In some embodiments, the methods provided herein comprise one or more of the following steps: (1) identifying platinum targets, (2) selection of the guides to minimize the number of off-target candidates occurring on high frequency haplotypes in the patient population; (3) select guide (and/or effector protein) based low frequency variation captured in large scale sequencing datasets to estimate the number of guide RNA-enzyme combinations required to effectively and safely treat different sizes of patient populations, and (4) confirm or select guide based on pre-therapeutic whole genome sequencing of individual patient. In particular embodiments, a “platinum” target is one that does not contain variants occurring at ≥0.01% allele frequency.

Determination of on/Off-Target Activity and Selecting Suitable Target Sequences Guides

[0373] In certain example embodiments, parameters such as, but not limited to, off-target candidates, PAM restrictiveness, target cleavage efficiency, or effector protein specific may be determined using sequencing-based double-strand break (DSB) detection assays. Example sequencing-based DSB detection assay sChIP-seq (Szilard et al. Nat. Struct. Mol. Biol. 18, 299-305 (2010); Iacovoni et al. EMBO J. 29, 1446-1457 (2010)), BLESS (Crosetto et al. Nat. Methods 10, 361-365 (2013); Ran et al. Nature 520, 186-191 (2015); Slaymaker et al. Science 351, 84-88 (2016)), GUIDEseq (Tsai et al. Nat. Biotech 33, 187-197 (2015)), Digenome-seq (Kim et al. Nat. Methods 12, 237-43 (2015)), IDLV-mediated DNA break capture (Wang et al. Nat. Biotechnol. 33, 179-186 (2015), HTGTS (Frock et al. Nat. Biotechnol. 33, 179-186 (2015)), End-Seq (Canela et al. Mol. Cell 63, 898-911 (2016), and DSBCapture (Lensing et al. Nat. Methods 13, 855-857 (2016). Additional methods that may be used to assess target cleavage efficiency include SITE-Seq (Cameron et al. Nature Methods, 14, 600-606 (2017), and CIRCLE-seq (Tsai et al. Nature Methods 14, 607-614 (2017)).

[0374] Methods useful for assessing Cpf1 RNase activity include those disclosed in Zhong et al. Nature Chemical Biology Jun. 19, 2017 doi: 10.1038/NCHEMBIO.2410 and may be similarly applied to Cas effectors described herein (including but not limited to the Cas effectors described herein). Increased RNase activity and the ability to excise multiple CRISPR RNAs (crRNA) from a single RNA polymerase II-driven RNA transcript can simplify modification of multiple genomic targets and can be used to increase the efficiency of Cas (e.g., Type II-D Cas)-mediated editing.

### BLISS

[0375] Other suitable assays include those described in Yan et al. (“BLISS: quantitative and versatile genome-wide profiling of DNA breaks in situ” BioRxiv, Dec. 4, 2016 doi: http://dx.doi.org/10.1101/091629) describe a versatile, sensitive and quantitative method for detecting DSBs applicable to low-input specimens of both cells and tissues that is scalable for high-throughput DSB mapping in multiple samples. Breaks Labeling In Situ and Sequencing (BLISS), features efficient in situ DSB labeling in fixed cells or tissue sections immobilized onto a solid surface, linear amplification of tagged DSBs via T7-mediated in vitro transcription (IVT) for greater sensitivity, and accurate DSB quantification by incorporation of unique molecular identifiers (UMIs).

### Curtain

[0376] A further method, referred to herein as “Curtain” has been developed which may also be useful in assessing certain parameters disclosed herein, the method allowing on target and off target cutting of a nuclease to be assessed in a direct and unbiased way using in vitro cutting of immobilized nucleic acid molecules. Further reference is made to WO/2017/218979, which is. Incorporated by reference herein and can be adapted for use in the design and/or characterization of the CRISRP-Cas systems described herein.

[0377] This method may also be used to select a suitable guide RNA. The method allows the detection of a nucleic acid modification, by performing the following steps: i) contacting one or more nucleic acid molecules immobilized on a solid support (immobilized nucleic acid molecules) with an agent capable of inducing a nucleic acid modification; and ii) sequencing at least part of said one or more immobilized nucleic acid molecules that comprises the nucleic acid modification using a primer specifically binding to a primer binding site. This method further allows the selection of a guide RNA from a plurality of guide RNAs specific for a selected target sequence. In particular embodiments, the method comprises contacting a plurality of nucleic acid molecules immobilized on a solid support (immobilized nucleic acid molecules) with a plurality of RNA-guided nuclease complexes capable of inducing a nucleic acid break, said plurality of RNA-guided nuclease complexes comprising a plurality of different guide RNA's, thereby inducing one or more nucleic acid breaks; attaching an adapter comprising a primer binding site to said one or more immobilized nucleic acid molecules comprising a nucleic acid break; sequencing at least part of said one or more immobilized nucleic acid molecules comprising a nucleic acid break using a primer specifically binding to said primer binding site; and selecting a guide RNA based on location and/or amount of said one or more breaks.

[0378] In particular embodiments, the method comprises determining one or more locations in said one or more immobilized nucleic acid molecules comprising a break other than a location comprising said selected target sequence (off-target breaks) and selecting a guide RNA based on said one or more locations. In particular embodiments, step v comprises determining a number of sites in said one or more immobilized nucleic acid molecules comprising off-target breaks and selecting a guide RNA based on said number of sites. In a further embodiment, step iv comprises both determining the location of off-targets breaks and the number of locations of off-target breaks.

### Optimizing Safety of the CRISPR-Cas Systems

[0379] Selection of the Cas-Effector(s) with the Shortest Half-Life

### Half-Life of the Cas Effector(s)

[0380] The extended presence of an effector protein after having performed its function at the target site is a potential safety concern, both for off-target effects and direct toxicity of the effector protein. It has been reported that upon direct delivery to the cell by LNP, CRISPR effector proteins degrade rapidly within the cell (Kim et al. Genome Res. 2014 June; 24(6): 1012-1019). Where the effector protein is to be expressed from a plasmid, strategies to actively reduce the half-life of the protein can be used in the design of the CRISPR-Cas system.

### Use of Destabilized Domains

[0381] In certain embodiments, the methods provided herein involve the use of a Cas effector (e.g., a Cas protein) which is associated with or fused to a destabilization domain (DD). The technology relating to the use of destabilizing domains is described in detail in WO2016/106244, which is incorporated by reference herein.

[0382] Destabilizing domains (DD) are domains which can confer instability to a wide range of proteins; see, e.g., Miyazaki, J Am Chem Soc. Mar. 7, 2012; 134(9): 3942-3945, and Chung H Nature Chemical Biology Vol. 11 Sep. 2015 pp. 713-720, incorporated herein by reference. The DD can be associated with, e.g., fused to, advantageously with a linker, to a CRISPR enzyme, whereby the DD can be stabilized in the presence of a ligand and when there is the absence thereof the DD can become destabilized, whereby the CRISPR enzyme is entirely destabilized, or the DD can be stabilized in the absence of a ligand and when the ligand is present the DD can become destabilized; the DD allows the Cas effector to be regulated or controlled, thereby providing means for regulation or control of the system. For instance, when a protein of interest is expressed as a fusion with the DD tag, it is destabilized and rapidly degraded in the cell, e.g., by proteasomes. Thus, absence of stabilizing ligand leads to a DD-associated Cas effector being degraded. Peak activity of the Cas effector is relevant to reduce off-target effects and for the general safety of the system. Advantages of the DD system include that it can be dosable, orthogonal (e.g., a ligand only affects its cognate DD so two or more systems can operate independently), transportable (e.g., may work in different cell types or cell lines) and allows for temporal control.

[0383] Suitable DD—stabilizing ligand pairs are known in the art and also described in WO2016/106244. The size of Destabilization Domain varies but is typically approx.-approx. 100-300 amino acids in size. Suitable examples include ER50 and/or DHFR50. A corresponding stabilizing ligand for ER50 is, for example, 4HT or CMP8. In some embodiments, one or two DDs may be fused to the N-terminal end of the CRISPR enzyme with one or two DDs fused to the C-terminal of the CRISPR enzyme. While the DD can be provided directly at N and/or C terminal(s) of the Cas (e.g., Type II-D Cas) effector protein, they can also be fused via a linker, such as a GlySer linker, or an NLS and/or NES. A commercially available DD system is the CloneTech, ProteoTuner™ system; the stabilizing ligand is Shield1. In some embodiments, the stabilizing ligand is a ‘small molecule’, preferably it is cell-permeable and has a high affinity for its corresponding DD.

[0384] In some embodiments, the CRISPR enzyme is fused to Destabilization Domain (DD). In other words, the DD may be associated with the CRISPR enzyme by fusion with said CRISPR enzyme. The AAV can then, by way of nucleic acid molecule(s) deliver the stabilizing ligand (or such can be otherwise delivered) In some embodiments, the enzyme may be considered to be a modified CRISPR enzyme, wherein the CRISPR enzyme is fused to at least one destabilization domain (DD) and VP2.

### Selection of the Least Immunogenic RNP

[0385] When administering an agent to a mammal, there is always the risk of an immune response to the agent and/or its delivery vehicle. Circumventing the immune response is a major challenge for most delivery vehicles. Viral vectors, which express immunogenic epitopes within the organism typically induce an immune response. Nanoparticle and lipid-based vectors to some extent address this problem. Yin et al. demonstrate a therapeutic approach combining viral delivery of the guide RNA with lipid nanoparticle-mediated delivery of the CRISPR effector protein (Nature Biotechnology 34:328-33(2016)). Ziris et al. describes cationic-lipid mediated delivery of Cas9:guideRNA nuclease complexes to cells, which can be applied to the Type II-D CRISPR-Cas systems described herein. The Cas effector proteins (e.g., Type II-D Cas effectors described herein), which can also of bacterial origin, also inherently carry the risk of eliciting an immune response. This may be addressed by humanizing the Type II-D Cas effector protein.

### Introduction of Modifications in Guide RNA to Minimize Immunogenicity

[0386] Chemical modifications of RNAs have been used to avoid reactions of the innate immune system. Judge et al. (2006) demonstrated that immune stimulation by synthetic siRNA can be completely abrogated by selective incorporation of 2′-O-methyl (2′OMe) uridine or guanosine nucleosides into one strand of the siRNA duplex (Mol. Ther., 13 (2006), pp. 494-505). Cekaite et al. (J. Mol. Biol., 365 (2007), pp. 90-108) observed that replacement of only uridine bases of siRNA with either 2′-fluoro or 2′-O-methyl modified counterparts abrogated upregulation of genes involved in the regulation of the immune response. Similarly, Hendel et al. tested sgRNAs with both backbone and sugar modifications that confer nuclease stability and can reduce immunostimulatory effects (Hendel et al., Nat. Biotechnol., 33 (2015), pp. 985-989).

[0387] In some embodiments, the guide RNA can be designed so as to minimize immunogenicity using one or more of these methods and/or incorporation of one or more chemical modifications.

### Identifying Optimal Dosages to Minimize Toxicity and Maximize Specificity

[0388] It is generally accepted that the dosage of CRISPR-Cas system and/or components thereof will be relevant to toxicity and specificity of the system (Pattanayak et al. Nat Biotechnol. 2013 September; 31(9): 839-843). Hsu et al. (Nat Biotechnol. 2013 September; 31(9): 827-832) demonstrated that the dosage of SpCas9 and sgRNA can be titrated to address these issues and can be applied and/or adapted for the CRISPR-Cas systems described herein. In certain example embodiments, toxicity is minimized by saturating complex with guide by either pre-forming complex, putting guide under control of a strong promoter, or via timing of delivery to ensure saturating conditions available during expression of the effector protein.

### Identification of Appropriate Delivery Method/Vehicle

[0389] To increase safety, the delivery method and/or vehicle can be optimized. Delivery methods, including but not limited to, polynucleotides, vectors, virus particles, particles etc. are described in greater detail herein. Further, advantages of various delivery compositions, formulations and techniques, with respect to e.g. safety are also discussed elsewhere herein. In some embodiments, multiple delivery techniques can be mixed and utilized to achieve the appropriate effect. Further, administration route can be altered to increase safety. Various administration routes are described elsewhere herein. Delivery timing and regimen can also be modified to increase safety of the CRISPR-Cas systems described herein. Various exemplary and non-limiting delivery regimens are described elsewhere herein. One of ordinary skill in the art will appreciate appropriate delivery compositions and approaches for specific embodiments of the CRISPR-Cas system and methods of using the CRISPR-Cas system in view of this disclosure.

### CRISPR-Cas System Complexes

[0390] Components of engineered CRISPR-Cas system described herein can be provided individually or complexed with one or more other components of the engineered CRISPR-Cas system. In certain embodiments, a complex can include on or more Cas proteins bound to or otherwise associated with one or more nucleic acid components, accessory molecule(s), adaptors, and/or another component described elsewhere herein. In some embodiments, a complex can include one or more Cas proteins bound to or otherwise associated with a guide polynucleotide and optionally one or more other nucleic acid components accessory molecule(s), adaptors, and/or another component described elsewhere herein. The complexes can be provided to a subject, cell, or target polynucleotide as described in greater detail elsewhere herein.

[0391] In some embodiments, the complex thus forms a ribonucleoprotein or RNP that includes one or more CRISPR-Cas effector proteins complexed with one or more guide polynucleotides. In some embodiments, the CRISPR-Cas RNP complexes can be delivered to a cell. Suitable delivery techniques and vehicles are described elsewhere herein. An important advantage is that both RNP delivery is transient, reducing off-target effects and toxicity issues. Efficient genome editing in different cell types has been observed by Kim et al. (2014, Genome Res. 24(6):1012-9), Paix et al. (2015, Genetics 204(1):47-54), Chu et al. (2016, BMC Biotechnol. 16:4), and Wang et al. (2013, Cell. 9; 153(4):910-8).

[0392] In particular embodiments, the ribonucleoprotein is delivered by way of a polypeptide-based shuttle agent as described in WO2016161516. WO2016161516 describes efficient transduction of polypeptide cargos using synthetic peptides comprising an endosome leakage domain (ELD) operably linked to a cell penetrating domain (CPD), to a histidine-rich domain and a CPD. Similarly, these polypeptides can be used for the delivery of CRISPR-effector based RNPs in eukaryotic cells.

[0393] The (i) Cas or nucleic acid molecule(s) encoding it or (ii) crRNA can be delivered separately; and advantageously at least one or both of one of (i) and (ii), e.g., an assembled complex is delivered via a particle or nanoparticle complex. The Cas protein mRNA can be delivered prior to the guide RNA or crRNA to give time for nucleic acid-targeting effector protein to be expressed. The Cas protein mRNA might be administered 1-12 hours (preferably around 2-6 hours) prior to the administration of guide RNA or crRNA. Alternatively, the Cas protein mRNA and guide RNA or crRNA can be administered together. Advantageously, a second booster dose of guide RNA or crRNA can be administered 1-12 hours (preferably around 2-6 hours) after the initial administration of Cas protein mRNA+guide RNA. Additional administrations of Cas protein mRNA and/or guide RNA or crRNA might be useful to achieve the most efficient levels of genome modification. Other aspects of complex delivery are further discussed elsewhere herein.

### Delivery

[0394] The present disclosure also provides delivery systems for introducing components of the systems and compositions described elsewhere herein (such as a small Type II-D Cas protein and/or CRISPR-Cas system) to cells, tissues, organs, or organisms. A delivery system may comprise one or more delivery vehicles and/or cargos. Exemplary delivery systems and methods include those described in paragraphs [00117] to [00278] of Feng Zhang et al., (WO2016106236A1), and pages 1241-1251 and Table 1 of Lino C A et al., Delivering CRISPR: a review of the challenges and approaches, DRUG DELIVERY, 2018, VOL. 25, NO. 1, 1234-1257, which are incorporated by reference herein in their entireties.

[0395] In some embodiments, the delivery systems may be used to introduce the components of the systems and compositions to plant cells. For example, the components may be delivered to plant using electroporation, microinjection, aerosol beam injection of plant cell protoplasts, biolistic methods, DNA particle bombardment, and/or Agrobacterium-mediated transformation. Examples of methods and delivery systems for plants include those described in Fu et al., Transgenic Res. 2000 February; 9(1):11-9; Klein R M, et al., Biotechnology. 1992; 24:384-6; Casas A M et al., Proc Natl Acad Sci USA. 1993 Dec. 1; 90(23): 11212-11216; and U.S. Pat. No. 5,563,055, Davey M R et al., Plant Mol Biol. 1989 September; 13(3):273-85, which are incorporated by reference herein in their entireties.

[0396] In some embodiments, the amount or concentration, timing, delivery vehicle or approach (vector vs. mRNA vs. RNP, etc.), delivery location or type (systemic vs. local or responsive or ubiquitous, etc.) can be considered and optimized for the CRISRP-Cas system or component thereof being delivered, subject, disease, etc. and/or to reduce or minimize off-target effects. Objective tests, assays, and controls to determine optimization will be readily apparent to those of ordinary skill in the art in view of the description provided herein. For example, non-human animal, plant, and/or in vitro models can be used along with deep sequencing to analyze the extent of modification.

### Cargos

[0397] The delivery systems may comprise one or more cargos. The cargos may comprise one or more components of the CRISPR-Cas systems and compositions herein. A cargo may comprise one or more of the following: i) a vector or vector system (viral or non-viral) encoding one or more Cas proteins; ii) a vector or vector system (viral or non-viral) encoding one or more guide RNAs described herein, iii) mRNA of one or more Cas proteins; iv) one or more guide RNAs; v) one or more Cas proteins; vi) one or more polynucleotides encoding one or more Cas proteins; vii) one or more polynucleotides encoding one or more guide RNAs, or viii) any combination thereof. In some examples, a cargo may comprise a plasmid encoding one or more Cas protein and one or more (e.g., a plurality of) guide RNAs. In some embodiments, a cargo may comprise mRNA encoding one or more Cas proteins and one or more guide RNA.

[0398] In some embodiments, a cargo may comprise one or more Cas proteins described herein and one or more guide RNAs, e.g., in the form of ribonucleoprotein complexes (RNP). The ribonucleoprotein complexes may be delivered by methods and systems herein. In some cases, the ribonucleoprotein may be delivered by way of a polypeptide-based shuttle agent. In one example, the ribonucleoprotein may be delivered using synthetic peptides comprising an endosome leakage domain (ELD) operably linked to a cell penetrating domain (CPD), to a histidine-rich domain and a CPD, e.g., as describe in WO2016161516. RNP may also be used for delivering the compositions and systems to plant cells, e.g., as described in Wu J W, et al., Nat Biotechnol. 2015 November; 33(11):1162-4.

[0399] In some embodiments, the cargo(s) can be any of the polynucleotide(s), e.g., CRISPR-Cas System polynucleotides described herein.

### Physical Delivery

[0400] In some embodiments, the cargos may be introduced to cells by physical delivery methods. Examples of physical methods include microinjection, electroporation, and hydrodynamic delivery. Both nucleic acid and proteins may be delivered using such methods. For example, Cas protein may be prepared in vitro, isolated, (refolded, purified if needed), and introduced to cells.

### Microinjection

[0401] Microinjection of the cargo directly to cells can achieve high efficiency, e.g., above 90% or about 100%. In some embodiments, microinjection may be performed using a microscope and a needle (e.g., with 0.5-5.0 μm in diameter) to pierce a cell membrane and deliver the cargo directly to a target site within the cell. Microinjection may be used for in vitro and ex vivo delivery.

[0402] Plasmids comprising coding sequences for Cas proteins and/or guide RNAs, mRNAs, and/or guide RNAs, may be microinjected. In some cases, microinjection may be used i) to deliver DNA directly to a cell nucleus, and/or ii) to deliver mRNA (e.g., in vitro transcribed) to a cell nucleus or cytoplasm. In certain examples, microinjection may be used to delivery sgRNA directly to the nucleus and Cas-encoding mRNA to the cytoplasm, e.g., facilitating translation and shuttling of Cas to the nucleus.

[0403] Microinjection may be used to generate genetically modified animals. For example, gene editing cargos may be injected into zygotes to allow for efficient germline modification. Such approach can yield normal embryos and full-term mouse pups harboring the desired modification(s). Microinjection can also be used to provide transiently up- or down-regulate a specific gene within the genome of a cell, e.g., using CRISPRa and CRISPRi.

### Electroporation

[0404] In some embodiments, the cargos and/or delivery vehicles may be delivered by electroporation. Electroporation may use pulsed high-voltage electrical currents to transiently open nanometer-sized pores within the cellular membrane of cells suspended in buffer, allowing for components with hydrodynamic diameters of tens of nanometers to flow into the cell. In some cases, electroporation may be used on various cell types and efficiently transfer cargo into cells. Electroporation may be used for in vitro and ex vivo delivery.

[0405] Electroporation may also be used to deliver the cargo to into the nuclei of mammalian cells by applying specific voltage and reagents, e.g., by nucleofection. Such approaches include those described in Wu Y, et al. (2015). Cell Res 25:67-79; Ye L, et al. (2014). Proc Natl Acad Sci USA 111:9591-6; Choi P S, Meyerson M. (2014). Nat Commun 5:3728; Wang J, Quake S R. (2014). Proc Natl Acad Sci 111:13157-62. Electroporation may also be used to deliver the cargo in vivo, e.g., with methods described in Zuckermann M, et al. (2015). Nat Commun 6:7391.

### Hydrodynamic Delivery

[0406] Hydrodynamic delivery may also be used for delivering the cargos, e.g., for in vivo delivery. In some examples, hydrodynamic delivery may be performed by rapidly pushing a large volume (8-10% body weight) solution containing the gene editing cargo into the bloodstream of a subject (e.g., an animal or human), e.g., for mice, via the tail vein. As blood is incompressible, the large bolus of liquid may result in an increase in hydrodynamic pressure that temporarily enhances permeability into endothelial and parenchymal cells, allowing for cargo not normally capable of crossing a cellular membrane to pass into cells. This approach may be used for delivering naked DNA plasmids and proteins. The delivered cargos may be enriched in liver, kidney, lung, muscle, and/or heart.

### Transfection

[0407] The cargos, e.g., nucleic acids and/or polypeptides, may be introduced to cells by transfection methods for introducing nucleic acids into cells. Examples of transfection methods include calcium phosphate-mediated transfection, cationic transfection, liposome transfection, dendrimer transfection, heat shock transfection, magnetofection, lipofection, impalefection, optical transfection, proprietary agent-enhanced uptake of nucleic acid.

### Transduction

[0408] The cargos, e.g., nucleic acids and/or polypeptides, can be introduced to cells by transduction by a viral or pseudoviral particle. Methods of packaging the cargos in viral particles can be accomplished using any suitable viral vector or vector systems. Such viral vector and vector systems are described in greater detail elsewhere herein. As used in this context herein “transduction” refers to the process by which foreign nucleic acids and/or proteins are introduced to a cell (prokaryote or eukaryote) by a viral or pseudo viral particle. After packaging in a viral particle or pseudo viral particle, the viral particles can be exposed to cells (e.g. in vitro, ex vivo, or in vivo) where the viral or pseudoviral particle infects the cell and delivers the cargo to the cell via transduction. Viral and pseudoviral particles can be optionally concentrated prior to exposure to target cells. In some embodiments, the virus titer of a composition containing viral and/or pseudoviral particles can be obtained and a specific titer be used to transduce cells.

### Biolistics

[0409] The cargos, e.g., nucleic acids and/or polypeptides, can be introduced to cells using a biolistic method or technique. The term of art “biolistic”, as used herein refers to the delivery of nucleic acids to cells by high-speed particle bombardment. In some embodiments, the cargo(s) can be attached, associated with, or otherwise coupled to particles, which than can be delivered to the cell via a gene-gun (see e.g., Liang et al. 2018. Nat. Protocol. 13:413-430; Svitashev et al. 2016. Nat. Comm. 7:13274; Ortega-Escalante et al., 2019. Plant. J. 97:661-672). In some embodiments, the particles can be gold, tungsten, palladium, rhodium, platinum, or iridium particles.

### Implantable Devices

[0410] In some embodiments, the delivery system can include an implantable device that incorporates or is coated with a CRISPR-Cas system or component thereof described herein. Various implantable devices are described in the art, and include any device, graft, or other composition that can be implanted into a subject.

### Delivery Vehicles

[0411] The delivery systems may comprise one or more delivery vehicles. The delivery vehicles may deliver the cargo into cells, tissues, organs, or organisms (e.g., animals or plants). The cargos may be packaged, carried, or otherwise associated with the delivery vehicles. The delivery vehicles may be selected based on the types of cargo to be delivered, and/or the delivery is in vitro and/or in vivo. Examples of delivery vehicles include vectors, viruses (e.g., virus particles), non-viral vehicles, and other delivery reagents described herein.

[0412] The delivery vehicles in accordance with the present invention may a greatest dimension (e.g., diameter) of less than 100 microns (μm). In some embodiments, the delivery vehicles have a greatest dimension of less than 10 μm. In some embodiments, the delivery vehicles may have a greatest dimension of less than 2000 nanometers (nm). In some embodiments, the delivery vehicles may have a greatest dimension of less than 1000 nanometers (nm). In some embodiments, the delivery vehicles may have a greatest dimension (e.g., diameter) of less than 900 nm, less than 800 nm, less than 700 nm, less than 600 nm, less than 500 nm, less than 400 nm, less than 300 nm, less than 200 nm, less than 150 nm, or less than 100 nm, less than 50 nm. In some embodiments, the delivery vehicles may have a greatest dimension ranging between 25 nm and 200 nm.

[0413] In some embodiments, the delivery vehicles may be or comprise particles. For example, the delivery vehicle may be or comprise nanoparticles (e.g., particles with a greatest dimension (e.g., diameter) no greater than 1000 nm. The particles may be provided in different forms, e.g., as solid particles (e.g., metal such as silver, gold, iron, titanium), non-metal, lipid-based solids, polymers), suspensions of particles, or combinations thereof. Metal, dielectric, and semiconductor particles may be prepared, as well as hybrid structures (e.g., core-shell particles).

[0414] Nanoparticles may also be used to deliver the compositions and systems to plant cells, e.g., as described in International Patent Publication No. WO 2008042156, US 20130185823, and WO2015089419. In general, a “nanoparticle” refers to any particle having a diameter of less than 1000 nm. In certain preferred embodiments, nanoparticles of the invention have a greatest dimension (e.g., diameter) of 500 nm or less. In other preferred embodiments, nanoparticles of the invention have a greatest dimension ranging between 25 nm and 200 nm. In other preferred embodiments, nanoparticles of the invention have a greatest dimension of 100 nm or less. In other preferred embodiments, nanoparticles of the invention have a greatest dimension ranging between 35 nm and 60 nm. It will be appreciated that reference made herein to particles or nanoparticles can be interchangeable, where appropriate. Nanoparticles made of semiconducting material may also be labeled quantum dots if they are small enough (typically sub 10 nm) that quantization of electronic energy levels occurs. Such nanoscale particles are used in biomedical applications as drug carriers or imaging agents and may be adapted for similar purposes in the present invention. Semi-solid and soft nanoparticles have been manufactured and are within the scope of the present invention. Nanoparticles with one half hydrophilic and the other half hydrophobic are termed Janus particles and are particularly effective for stabilizing emulsions. They can self-assemble at water/oil interfaces and act as solid surfactants.

[0415] Particle characterization (including e.g., characterizing morphology, dimension, etc.) is done using a variety of different techniques. Common techniques are electron microscopy (TEM, SEM), atomic force microscopy (AFM), dynamic light scattering (DLS), X-ray photoelectron spectroscopy (XPS), powder X-ray diffraction (XRD), Fourier transform infrared spectroscopy (FTIR), matrix-assisted laser desorption/ionization time-of-flight mass spectrometry (MALDI-TOF), ultraviolet-visible spectroscopy, dual polarization interferometry and nuclear magnetic resonance (NMR). Characterization (dimension measurements) may be made as to native particles (i.e., preloading) or after loading of the cargo (herein cargo refers to e.g., one or more components of CRISPR-Cas system e.g., CRISPR enzyme or mRNA or guide RNA, or any combination thereof, and may include additional carriers and/or excipients) to provide particles of an optimal size for delivery for any in vitro, ex vivo and/or in vivo application of the present invention. In certain preferred embodiments, particle dimension (e.g., diameter) characterization is based on measurements using dynamic laser scattering (DLS). Mention is made of U.S. Pat. Nos. 8,709,843; 6,007,845; 5,855,913; 5,985,309; 5,543,158; and the publication by James E. Dahlman and Carmen Barnes et al. Nature Nanotechnology (2014) published online 11 May 2014, doi:10.1038/nnano.2014.84, describing particles, methods of making and using them and measurements thereof.

### Vectors and Vector Systems

[0416] Also provided herein are vectors that can contain one or more of the CRISPR-Cas system polynucleotides described herein. In certain embodiments, the vector can contain one or more polynucleotides encoding one or more elements of a CRISPR-Cas system described herein. The vectors can be useful in producing bacterial, fungal, yeast, plant cells, animal cells, and transgenic animals that can express one or more components of the CRISPR-Cas system described herein. Within the scope of this disclosure are vectors containing one or more of the polynucleotide sequences described herein. One or more of the polynucleotides that are part of the CRISPR-Cas system described herein can be included in a vector or vector system. The vectors and/or vector systems can be used, for example, to express one or more of the polynucleotides in a cell, such as a producer cell, to produce CRISPR-Cas system containing virus particles described elsewhere herein. Other uses for the vectors and vector systems described herein are also within the scope of this disclosure. In general, and throughout this specification, the term “vector” refers to a tool that allows or facilitates the transfer of an entity from one environment to another. In some contexts which will be appreciated by those of ordinary skill in the art, “vector” can be a term of art to refer to a nucleic acid molecule capable of transporting another nucleic acid to which it has been linked. A vector can be a replicon, such as a plasmid, phage, or cosmid, into which another DNA segment may be inserted so as to bring about the replication of the inserted segment. Generally, a vector is capable of replication when associated with the proper control elements.

[0417] Vectors include, but are not limited to, nucleic acid molecules that are single-stranded, double-stranded, or partially double-stranded; nucleic acid molecules that comprise one or more free ends, no free ends (e.g., circular); nucleic acid molecules that comprise DNA, RNA, or both; and other varieties of polynucleotides known in the art. One type of vector is a “plasmid,” which refers to a circular double stranded DNA loop into which additional DNA segments can be inserted, such as by standard molecular cloning techniques. Another type of vector is a viral vector, wherein virally-derived DNA or RNA sequences are present in the vector for packaging into a virus (e.g., retroviruses, replication defective retroviruses, adenoviruses, replication defective adenoviruses, and adeno-associated viruses (AAVs)). Viral vectors also include polynucleotides carried by a virus for transfection into a host cell. Certain vectors are capable of autonomous replication in a host cell into which they are introduced (e.g., bacterial vectors having a bacterial origin of replication and episomal mammalian vectors). Other vectors (e.g., non-episomal mammalian vectors) are integrated into the genome of a host cell upon introduction into the host cell, and thereby are replicated along with the host genome. Moreover, certain vectors are capable of directing the expression of genes to which they are operatively-linked. Such vectors are referred to herein as “expression vectors.” Common expression vectors of utility in recombinant DNA techniques are often in the form of plasmids.

[0418] Recombinant expression vectors can be composed of a nucleic acid (e.g., a polynucleotide) of the invention in a form suitable for expression of the nucleic acid in a host cell, which means that the recombinant expression vectors include one or more regulatory elements, which can be selected on the basis of the host cells to be used for expression, that is operatively-linked to the nucleic acid sequence to be expressed. Within a recombinant expression vector, “operably linked” and “operatively-linked” are used interchangeably herein and further defined elsewhere herein. In the context of a vector, the term “operably linked” is intended to mean that the nucleotide sequence of interest is linked to the regulatory element(s) in a manner that allows for expression of the nucleotide sequence (e.g., in an in vitro transcription/translation system or in a host cell when the vector is introduced into the host cell). Advantageous vectors include lentiviruses and adeno-associated viruses, and types of such vectors can also be selected for targeting particular types of cells. These and other embodiments of the vectors and vector systems are described elsewhere herein.

[0419] In some embodiments, the vector can be a bicistronic vector. In some embodiments, a bicistronic vector can be used for one or more elements of the CRISPR-Cas system described herein. In some embodiments, expression of elements of the CRISPR-Cas system described herein can be driven by the CBh promoter or other ubiquitous promoter. Where the element of the CRISPR-Cas system is an RNA, its expression can be driven by a Pol III promoter, such as a U6 promoter. In some embodiments, the two are combined.

[0420] In some embodiments, a vector capable of delivering an effector protein and optionally at least one CRISPR guide RNA to a cell can be composed of or contain a minimal promoter operably linked to a polynucleotide sequence encoding the effector protein and a second minimal promoter operably linked to a polynucleotide sequence encoding at least one guide RNA, wherein the length of the vector sequence comprising the minimal promoters and polynucleotide sequences is less than 4.4 Kb. In an embodiment, the vector can be a viral vector. In certain embodiments, the viral vector is an is an adeno-associated virus (AAV) or an adenovirus vector. In another embodiment, the effector protein is a Cas protein. In a further embodiment, the CRISPR enzyme is Type II-D Cas protein.

[0421] In some embodiments, the vector capable of delivering a lentiviral vector for an effector protein and at least one CRISPR guide RNA to a cell can be composed of or contain a promoter operably linked to a polynucleotide sequence encoding Cas and a second promoter operably linked to a polynucleotide sequence encoding at least one guide RNA, wherein the polynucleotide sequences are in reverse orientation.

[0422] In one embodiment, the invention provides a vector system comprising one or more vectors. In some embodiments, the system comprises: (a) a first regulatory element operably linked to a direct repeat sequence and one or more insertion sites for inserting one or more guide sequences up- or downstream (whichever applicable) of the direct repeat sequence, wherein when expressed, the one or more guide sequence(s) direct(s) sequence-specific binding of the CRISPR complex to the one or more target sequence(s) in a eukaryotic cell, wherein the CRISPR complex comprises a Cas enzyme complexed with the one or more guide sequence(s) that is hybridized to the one or more target sequence(s); and (b) a second regulatory element operably linked to an enzyme-coding sequence encoding said Cas enzyme, preferably comprising at least one nuclear localization sequence and/or at least one NES; wherein components (a) and (b) are located on the same or different vectors of the system. Where applicable, a tracr sequence may also be provided. In some embodiments, component (a) further comprises two or more guide sequences operably linked to the first regulatory element, wherein when expressed, each of the two or more guide sequences direct sequence specific binding of a Cas CRISPR complex to a different target sequence in a eukaryotic cell. In some embodiments, the CRISPR complex comprises one or more nuclear localization sequences and/or one or more NES of sufficient strength to drive accumulation of said Cas CRISPR complex in a detectable amount in or out of the nucleus of a eukaryotic cell. In some embodiments, the first regulatory element is a polymerase III promoter. In some embodiments, the second regulatory element is a polymerase II promoter. In some embodiments, each of the guide sequences is at least 16, 17, 18, 19, 20, 25 nucleotides, or between 16-30, or between 16-25, or between 16-20 nucleotides in length.

[0423] These and others are further detailed and described elsewhere herein.

### Cell-Based Vector Amplification and Expression

[0424] Vectors may be introduced and propagated in a prokaryote or prokaryotic cell. In some embodiments, a prokaryote is used to amplify copies of a vector to be introduced into a eukaryotic cell or as an intermediate vector in the production of a vector to be introduced into a eukaryotic cell (e.g. amplifying a plasmid as part of a viral vector packaging system). The vectors can be viral-based or non-viral based. In some embodiments, a prokaryote is used to amplify copies of a vector and express one or more nucleic acids, such as to provide a source of one or more proteins for delivery to a host cell or host organism.

[0425] Vectors can be designed for expression of one or more elements of the CRISPR-Cas system described herein (e.g., nucleic acid transcripts, proteins, enzymes, and combinations thereof) in a suitable host cell. In some embodiments, the suitable host cell is a prokaryotic cell. Suitable host cells include, but are not limited to, bacterial cells, yeast cells, insect cells, and mammalian cells. In some embodiments, the suitable host cell is a eukaryotic cell.

[0426] In some embodiments, the suitable host cell is a suitable bacterial cell. Suitable bacterial cells include, but are not limited to, bacterial cells from the bacteria of the species Escherichia coli. Many suitable strains of E. coli are known in the art for expression of vectors. These include, but are not limited to Pir1, Stbl2, Stbl3, Stbl4, TOP10, XL1 Blue, and XL10 Gold. In some embodiments, the host cell is a suitable insect cell. Suitable insect cells include those from Spodoptera frugiperda. Suitable strains of S. frugiperda cells include, but are not limited to, Sf9 and Sf21. In some embodiments, the host cell is a suitable yeast cell. In some embodiments, the yeast cell can be from Saccharomyces cerevisiae. In some embodiments, the host cell is a suitable mammalian cell. Many types of mammalian cells have been developed to express vectors. Suitable mammalian cells include, but are not limited to, HEK293, Chinese Hamster Ovary Cells (CHOs), mouse myeloma cells, HeLa, U2OS, A549, HT1080, CAD, P19, NIH 3T3, L929, N2a, MCF-7, Y79, SO-Rb50, HepG G2, DIKX-X11, J558L, Baby hamster kidney cells (BHK), and chicken embryo fibroblasts (CEFs). Suitable host cells are discussed further in Goeddel, GENE EXPRESSION TECHNOLOGY: METHODS IN ENZYMOLOGY 185, Academic Press, San Diego, Calif (1990).

[0427] In some embodiments, the vector can be a yeast expression vector. Examples of vectors for expression in yeast Saccharomyces cerevisiae include pYepSec1 (Baldari, et al., 1987. EMBO J. 6: 229-234), pMFa (Kuijan and Herskowitz, 1982. Cell 30: 933-943), pJRY88 (Schultz et al., 1987. Gene 54: 113-123), pYES2 (Invitrogen Corporation, San Diego, Calif), and picZ (InVitrogen Corp, San Diego, Calif). As used herein, a “yeast expression vector” refers to a nucleic acid that contains one or more sequences encoding an RNA and/or polypeptide and may further contain any desired elements that control the expression of the nucleic acid(s), as well as any elements that enable the replication and maintenance of the expression vector inside the yeast cell. Many suitable yeast expression vectors and features thereof are known in the art; for example, various vectors and techniques are illustrated in in Yeast Protocols, 2nd edition, Xiao, W., ed. (Humana Press, New York, 2007) and Buckholz, R. G. and Gleeson, M. A. (1991) Biotechnology (NY) 9(11): 1067-72. Yeast vectors can contain, without limitation, a centromeric (CEN) sequence, an autonomous replication sequence (ARS), a promoter, such as an RNA Polymerase III promoter, operably linked to a sequence or gene of interest, a terminator such as an RNA polymerase III terminator, an origin of replication, and a marker gene (e.g., auxotrophic, antibiotic, or other selectable markers). Examples of expression vectors for use in yeast may include plasmids, yeast artificial chromosomes, 2 plasmids, yeast integrative plasmids, yeast replicative plasmids, shuttle vectors, and episomal plasmids.

[0428] In some embodiments, the vector is a baculovirus vector or expression vector and can be suitable for expression of polynucleotides and/or proteins in insect cells. In some embodiments, the suitable host cell is an insect cell. Baculovirus vectors available for expression of proteins in cultured insect cells (e.g., SF9 cells) include the pAc series (Smith, et al., 1983. Mol. Cell. Biol. 3: 2156-2165) and the pVL series (Lucklow and Summers, 1989. Virology 170: 31-39). rAAV (recombinant Adeno-associated viral) vectors are preferably produced in insect cells, e.g., Spodoptera frugiperda Sf9 insect cells, grown in serum-free suspension culture. Serum-free insect cells can be purchased from commercial vendors, e.g., Sigma Aldrich (EX-CELL 405).

[0429] In some embodiments, the vector is a mammalian expression vector. In some embodiments, the mammalian expression vector is capable of expressing one or more polynucleotides and/or polypeptides in a mammalian cell. Examples of mammalian expression vectors include, but are not limited to, pCDM8 (Seed, 1987. Nature 329: 840) and pMT2PC (Kaufman, et al., 1987. EMBO J. 6: 187-195). The mammalian expression vector can include one or more suitable regulatory elements capable of controlling expression of the one or more polynucleotides and/or proteins in the mammalian cell. For example, commonly used promoters are derived from polyoma, adenovirus 2, cytomegalovirus, simian virus 40, and others disclosed herein and known in the art. More detail on suitable regulatory elements are described elsewhere herein.

[0430] For other suitable expression vectors and vector systems for both prokaryotic and eukaryotic cells see, e.g., Chapters 16 and 17 of Sambrook, et al., MOLECULAR CLONING: A LABORATORY MANUAL. 2nd ed., Cold Spring Harbor Laboratory, Cold Spring Harbor Laboratory Press, Cold Spring Harbor, N.Y., 1989.

[0431] In some embodiments, the recombinant mammalian expression vector is capable of directing expression of the nucleic acid preferentially in a particular cell type (e.g., tissue-specific regulatory elements are used to express the nucleic acid). Tissue-specific regulatory elements are known in the art. Non-limiting examples of suitable tissue-specific promoters include the albumin promoter (liver-specific; Pinkert, et al., 1987. Genes Dev. 1: 268-277), lymphoid-specific promoters (Calame and Eaton, 1988. Adv. Immunol. 43: 235-275), in particular promoters of T cell receptors (Winoto and Baltimore, 1989. EMBO J. 8: 729-733) and immunoglobulins (Baneiji, et al., 1983. Cell 33: 729-740; Queen and Baltimore, 1983. Cell 33: 741-748), neuron-specific promoters (e.g., the neurofilament promoter; Byrne and Ruddle, 1989. Proc. Natl. Acad. Sci. USA 86: 5473-5477), pancreas-specific promoters (Edlund, et al., 1985. Science 230: 912-916), and mammary gland-specific promoters (e.g., milk whey promoter; U.S. Pat. No. 4,873,316 and European Application Publication No. 264,166). Developmentally-regulated promoters are also encompassed, e.g., the murine hox promoters (Kessel and Gruss, 1990. Science 249: 374-379) and the α-fetoprotein promoter (Campes and Tilghman, 1989. Genes Dev. 3: 537-546). With regards to these prokaryotic and eukaryotic vectors, mention is made of U.S. Pat. No. 6,750,059, the contents of which are incorporated by reference herein in their entirety. Other embodiments can utilize viral vectors, with regards to which mention is made of U.S. patent application Ser. No. 13/092,085, the contents of which are incorporated by reference herein in their entirety. Tissue-specific regulatory elements are known in the art and in this regard, mention is made of U.S. Pat. No. 7,776,321, the contents of which are incorporated by reference herein in their entirety. In some embodiments, a regulatory element can be operably linked to one or more elements of a CRISPR-Cas system so as to drive expression of the one or more elements of the CRISPR-Cas system described herein.

[0432] In some embodiments, the vector can be a fusion vector or fusion expression vector. In some embodiments, fusion vectors add a number of amino acids to a protein encoded therein, such as to the amino terminus, carboxy terminus, or both of a recombinant protein. Such fusion vectors can serve one or more purposes, such as: (i) to increase expression of recombinant protein; (ii) to increase the solubility of the recombinant protein; and (iii) to aid in the purification of the recombinant protein by acting as a ligand in affinity purification. In some embodiments, expression of polynucleotides (such as non-coding polynucleotides) and proteins in prokaryotes can be carried out in Escherichia coli with vectors containing constitutive or inducible promoters directing the expression of either fusion or non-fusion polynucleotides and/or proteins. In some embodiments, the fusion expression vector can include a proteolytic cleavage site, which can be introduced at the junction of the fusion vector backbone or other fusion moiety and the recombinant polynucleotide or protein to enable separation of the recombinant polynucleotide or protein from the fusion vector backbone or other fusion moiety subsequent to purification of the fusion polynucleotide or protein. Such enzymes, and their cognate recognition sequences, include Factor Xa, thrombin and enterokinase. Example fusion expression vectors include pGEX (Pharmacia Biotech Inc; Smith and Johnson, 1988. Gene 67: 31-40), pMAL (New England Biolabs, Beverly, Mass.) and pRIT5 (Pharmacia, Piscataway, N.J.) that fuse glutathione S-transferase (GST), maltose E binding protein, or protein A, respectively, to the target recombinant protein. Examples of suitable inducible non-fusion E. coli expression vectors include pTrc (Amrann et al., (1988) Gene 69:301-315) and pET lid (Studier et al., GENE EXPRESSION TECHNOLOGY: METHODS IN ENZYMOLOGY 185, Academic Press, San Diego, Calif. (1990) 60-89).

[0433] In some embodiments, one or more vectors driving expression of one or more elements of a CRISPR-Cas system described herein are introduced into a host cell such that expression of the elements of the engineered delivery system described herein direct formation a CRISPR-Cas complex at one or more target sites. For example, a CRISPR-Cas effector protein describe herein and a nucleic acid component (e.g., a guide polynucleotide) can each be operably linked to separate regulatory elements on separate vectors. RNA(s) of different elements of CRISPR-Cas system described herein can be delivered to an animal, plant, microorganism or cell thereof to produce an animal (e.g., a mammal, reptile, avian, etc.), plant, microorganism or cell thereof that constitutively, inducibly, or conditionally expresses different elements of the CRIPSR-Cas system described herein that incorporates one or more elements of the CRISPR-Cas system described herein or contains one or more cells that incorporates and/or expresses one or more elements of the CRISPR-Cas system described herein.

[0434] In some embodiments, two or more of the elements expressed from the same or different regulatory element(s), can be combined in a single vector, with one or more additional vectors providing any components of the system not included in the first vector. CRISPR-Cas system polynucleotides that are combined in a single vector may be arranged in any suitable orientation, such as one element located 5′ with respect to (“upstream” of) or 3′ with respect to (“downstream” of) a second element. The coding sequence of one element may be located on the same or opposite strand of the coding sequence of a second element and oriented in the same or opposite direction. In some embodiments, a single promoter drives expression of a transcript encoding one or more CRISPR-Cas system proteins, embedded within one or more intron sequences (e.g., each in a different intron, two or more in at least one intron, or all in a single intron). In some embodiments, the CRISPR-Cas system polynucleotides can be operably linked to and expressed from the same promoter.

### Cell-Free Vector and Polynucleotide Expression

[0435] In some embodiments, the polynucleotide encoding one or more features of the CRISPR-Cas system can be expressed from a vector or suitable polynucleotide in a cell-free in vitro system. In other words, the polynucleotide can be transcribed and optionally translated in vitro. In vitro transcription/translation systems and appropriate vectors are generally known in the art and commercially available. Generally, in vitro transcription and in vitro translation systems replicate the processes of RNA and protein synthesis, respectively, outside of the cellular environment. Vectors and suitable polynucleotides for in vitro transcription can include T7, SP6, T3, promoter regulatory sequences that can be recognized and acted upon by an appropriate polymerase to transcribe the polynucleotide or vector.

[0436] In vitro translation can be stand-alone (e.g., translation of a purified polyribonucleotide) or linked/coupled to transcription. In some embodiments, the cell-free (or in vitro) translation system can include extracts from rabbit reticulocytes, wheat germ, and/or E. coli. The extracts can include various macromolecular components that are needed for translation of exogenous RNA (e.g., 70S or 80S ribosomes, tRNAs, aminoacyl-tRNA, synthetases, initiation, elongation factors, termination factors, etc.). Other components can be included or added during the translation reaction, including but not limited to, amino acids, energy sources (ATP, GTP), energy regenerating systems (creatine phosphate and creatine phosphokinase (eukaryotic systems)) (phosphoenol pyruvate and pyruvate kinase for bacterial systems), and other co-factors (Mg2+, K+, etc.). As previously mentioned, in vitro translation can be based on RNA or DNA starting material. Some translation systems can utilize an RNA template as starting material (e.g. reticulocyte lysates and wheat germ extracts). Some translation systems can utilize a DNA template as a starting material (e.g., E coli-based systems). In these systems transcription and translation are coupled and DNA is first transcribed into RNA, which is subsequently translated. Suitable standard and coupled cell-free translation systems are generally known in the art and are commercially available.

### Vector Features

[0437] The vectors can include additional features that can confer one or more functionalities to the vector, the polynucleotide to be delivered, a virus particle produced there from, or polypeptide expressed thereof. Such features include, but are not limited to, regulatory elements, selectable markers, molecular identifiers (e.g., molecular barcodes), stabilizing elements, and the like. It will be appreciated by those skilled in the art that the design of the expression vector and additional features included can depend on such factors as the choice of the host cell to be transformed, the level of expression desired, etc.

### Regulatory Elements

[0438] In certain embodiments, the polynucleotides and/or vectors thereof described herein (such as the CRISPR-Cas system polynucleotides of the present invention) can include one or more regulatory elements that can be operatively linked to the polynucleotide. The term “regulatory element” is intended to include promoters, enhancers, internal ribosomal entry sites (IRES), other expression control elements (e.g., transcription termination signals, such as polyadenylation signals and poly-U sequences) and cellular localization signals (e.g., nuclear localization signals). Such regulatory elements are described, for example, in Goeddel, GENE EXPRESSION TECHNOLOGY: METHODS IN ENZYMOLOGY 185, Academic Press, San Diego, Calif. (1990). Regulatory elements include those that direct constitutive expression of a nucleotide sequence in many types of host cell and those that direct expression of the nucleotide sequence only in certain host cells (e.g., tissue-specific regulatory sequences). A tissue-specific promoter can direct expression primarily in a desired tissue of interest, such as muscle, neuron, bone, skin, blood, specific organs (e.g., liver, pancreas), or particular cell types (e.g., lymphocytes). Regulatory elements may also direct expression in a temporal-dependent manner, such as in a cell-cycle dependent or developmental stage-dependent manner, which may or may not also be tissue or cell-type specific. In some embodiments, a vector comprises one or more pol III promoter (e.g., 1, 2, 3, 4, 5, or more pol III promoters), one or more pol II promoters (e.g., 1, 2, 3, 4, 5, or more pol II promoters), one or more pol I promoters (e.g., 1, 2, 3, 4, 5, or more pol I promoters), or combinations thereof. Examples of pol III promoters include, but are not limited to, U6 and H1 promoters. Examples of pol II promoters include, but are not limited to, the retroviral Rous sarcoma virus (RSV) LTR promoter (optionally with the RSV enhancer), the cytomegalovirus (CMV) promoter (optionally with the CMV enhancer) (see, e.g., Boshart et al, Cell, 41:521-530 (1985)), the SV40 promoter, the dihydrofolate reductase promoter, the 3-actin promoter, the phosphoglycerol kinase (PGK) promoter, and the EF1α promoter. Also encompassed by the term “regulatory element” are enhancer elements, such as WPRE; CMV enhancers; the R-U5′ segment in LTR of HTLV-I (Mol. Cell. Biol., Vol. 8(1), p. 466-472, 1988); SV40 enhancer; and the intron sequence between exons 2 and 3 of rabbit β-globin (Proc. Natl. Acad. Sci. USA., Vol. 78(3), p. 1527-31, 1981).

[0439] In some embodiments, the regulatory sequence can be a regulatory sequence described in U.S. Pat. No. 7,776,321, U.S. Pat. Pub. No. 2011/0027239, and International Patent Publication No. WO 2011/028929, the contents of which are incorporated by reference herein in their entirety. In some embodiments, the vector can contain a minimal promoter. In some embodiments, the minimal promoter is the Mecp2 promoter, tRNA promoter, or U6. In a further embodiment, the minimal promoter is tissue specific. In some embodiments, the length of the vector polynucleotide the minimal promoters and polynucleotide sequences is less than 4.4 Kb.

[0440] To express a polynucleotide, the vector can include one or more transcriptional and/or translational initiation regulatory sequences, e.g. promoters, that direct the transcription of the gene and/or translation of the encoded protein in a cell. In some embodiments a constitutive promoter may be employed. Suitable constitutive promoters for mammalian cells are generally known in the art and include, but are not limited to SV40, CAG, CMV, EF-1α, β-actin, RSV, and PGK. Suitable constitutive promoters for bacterial cells, yeast cells, and fungal cells are generally known in the art, such as a T-7 promoter for bacterial expression and an alcohol dehydrogenase promoter for expression in yeast.

[0441] In some embodiments, the regulatory element can be a regulated promoter. “Regulated promoter” refers to promoters that direct gene expression not constitutively, but in a temporally- and/or spatially-regulated manner, and includes tissue-specific, tissue-preferred and inducible promoters. Regulated promoters include conditional promoters and inducible promoters. In some embodiments, conditional promoters can be employed to direct expression of a polynucleotide in a specific cell type, under certain environmental conditions, and/or during a specific state of development. Suitable tissue specific promoters can include, but are not limited to, liver specific promoters (e.g. APOA2, SERPIN A1 (hAAT), CYP3A4, and MIR122), pancreatic cell promoters (e.g. INS, IRS2, Pdx1, Alx3, Ppy), cardiac specific promoters (e.g. Myh6 (alpha MHC), MYL2 (MLC-2v), TNI3 (cTnl), NPPA (ANF), Slc8a1 (Ncx1)), central nervous system cell promoters (SYN1, GFAP, INA, NES, MOBP, MBP, TH, FOXA2 (HNF3 beta)), skin cell specific promoters (e.g. FLG, K14, TGM3), immune cell specific promoters, (e.g. ITGAM, CD43 promoter, CD14 promoter, CD45 promoter, CD68 promoter), urogenital cell specific promoters (e.g. Pbsn, Upk2, Sbp, Fer1l4), endothelial cell specific promoters (e.g. ENG), pluripotent and embryonic germ layer cell specific promoters (e.g. Oct4, NANOG, Synthetic Oct4, T brachyury, NES, SOX17, FOXA2, MIR122), and muscle cell specific promoter (e.g. Desmin). Other tissue and/or cell specific promoters are generally known in the art and are within the scope of this disclosure.

[0442] Inducible/conditional promoters can be positively inducible/conditional promoters (e.g. a promoter that activates transcription of the polynucleotide upon appropriate interaction with an activated activator, or an inducer (compound, environmental condition, or other stimulus) or a negative/conditional inducible promoter (e.g. a promoter that is repressed (e.g. bound by a repressor) until the repressor condition of the promotor is removed (e.g. inducer binds a repressor bound to the promoter stimulating release of the promoter by the repressor or removal of a chemical repressor from the promoter environment). The inducer can be a compound, environmental condition, or other stimulus. Thus, inducible/conditional promoters can be responsive to any suitable stimuli such as chemical, biological, or other molecular agents, temperature, light, and/or pH. Suitable inducible/conditional promoters include, but are not limited to, Tet-On, Tet-Off, Lac promoter, pBad, AlcA, LexA, Hsp70 promoter, Hsp90 promoter, pDawn, XVE/OlexA, GVG, and pOp/LhGR.

[0443] Where expression in a plant cell is desired, the components of the CRISPR-Cas system described herein are typically placed under control of a plant promoter, i.e. a promoter operable in plant cells. The use of different types of promoters is envisaged.

[0444] A constitutive plant promoter is a promoter that is able to express the open reading frame (ORF) that it controls in all or nearly all of the plant tissues during all or nearly all developmental stages of the plant (referred to as “constitutive expression”). One non-limiting example of a constitutive promoter is the cauliflower mosaic virus 35S promoter. Different promoters may direct the expression of a gene in different tissues or cell types, or at different stages of development, or in response to different environmental conditions. In particular embodiments, one or more of the CRISPR-Cas system components are expressed under the control of a constitutive promoter, such as the cauliflower mosaic virus 35S promoter issue-preferred promoters can be utilized to target enhanced expression in certain cell types within a particular plant tissue, for instance vascular cells in leaves or roots or in specific cells of the seed. Examples of particular promoters for use in the CRISPR-Cas system are found in Kawamata et al., (1997) Plant Cell Physiol 38:792-803; Yamamoto et al., (1997) Plant J 12:255-65; Hire et al, (1992) Plant Mol Biol 20:207-18, Kuster et al, (1995) Plant Mol Biol 29:759-72, and Capana et al., (1994) Plant Mol Biol 25:681-91.

[0445] Examples of promoters that are inducible and that can allow for spatiotemporal control of gene editing or gene expression may use a form of energy. The form of energy may include but is not limited to sound energy, electromagnetic radiation, chemical energy and/or thermal energy. Examples of inducible systems include tetracycline inducible promoters (Tet-On or Tet-Off), small molecule two-hybrid transcription activations systems (FKBP, ABA, etc.), or light inducible systems (Phytochrome, LOV domains, or cryptochrome), such as a Light Inducible Transcriptional Effector (LITE) that direct changes in transcriptional activity in a sequence-specific manner. The components of a light inducible system may include one or more elements of the CRISPR-Cas system described herein, a light-responsive cytochrome heterodimer (e.g. from Arabidopsis thaliana), and a transcriptional activation/repression domain. In some embodiments, the vector can include one or more of the inducible DNA binding proteins provided in International Patent Publication No. WO 2014/018423 and US Patent Publication Nos. 2015/0291966, 2017/0166903, 2019/0203212, which describe e.g. embodiments of inducible DNA binding proteins and methods of use and can be adapted for use with the present invention.

[0446] In some embodiments, transient or inducible expression can be achieved by including, for example, chemical-regulated promotors, i.e. whereby the application of an exogenous chemical induces gene expression. Modulation of gene expression can also be obtained by including a chemical-repressible promoter, where application of the chemical represses gene expression. Chemical-inducible promoters include, but are not limited to, the maize ln2-2 promoter, activated by benzene sulfonamide herbicide safeners (De Veylder et al., (1997) Plant Cell Physiol 38:568-77), the maize GST promoter (GST-ll-27, WO93/01294), activated by hydrophobic electrophilic compounds used as pre-emergent herbicides, and the tobacco PR-1 a promoter (Ono et al., (2004) Biosci Biotechnol Biochem 68:803-7) activated by salicylic acid. Promoters which are regulated by antibiotics, such as tetracycline-inducible and tetracycline-repressible promoters (Gatz et al., (1991) Mol Gen Genet 227:229-37; U.S. Pat. Nos. 5,814,618 and 5,789,156) can also be used herein.

[0447] In some embodiments, the polynucleotide, vector or system thereof can include one or more elements capable of translocating and/or expressing a CRISPR-Cas polynucleotide to/in a specific cell component or organelle. Such organelles can include, but are not limited to, nucleus, ribosome, endoplasmic reticulum, Golgi apparatus, chloroplast, mitochondria, vacuole, lysosome, cytoskeleton, plasma membrane, cell wall, peroxisome, centrioles, etc. Such regulatory elements can include, but are not limited to, nuclear localization signals (examples of which are described in greater detail elsewhere herein), any such as those that are annotated in the LocSigDB database (see e.g. http://genome.unmc.edu/LocSigDB/ and Negi et al., 2015. Database. 2015: bav003; doi: 10.1093/database/bav003), nuclear export signals (e.g., LXXXLXXLXL (SEQ ID NO: 135) and others described elsewhere herein), endoplasmic reticulum localization/retention signals (e.g. KDEL (SEQ ID NO: 136), KDXX (SEQ ID NO: 137), KKXX (SEQ ID NO: 138), KXX, and others described elsewhere herein; and see e.g. Liu et al. 2007 Mol. Biol. Cell. 18(3):1073-1082 and Gorleku et al., 2011. J. Biol. Chem. 286:39573-39584), mitochondria (see e.g. Cell Reports. 22:2818-2826, particularly at FIG. 2; Doyle et al. 2013. PLoS ONE 8, e67938; Funes et al. 2002. J. Biol. Chem. 277:6051-6058; Matouschek et al. 1997. PNAS USA 85:2091-2095; Oca-Cossio et al., 2003. 165:707-720; Waltner et al., 1996. J. Biol. Chem. 271:21226-21230; Wilcox et al., 2005. PNAS USA 102:15435-15440; Galanis et al., 1991. FEBS Lett 282:425-430, peroxisome (e.g. (S/A/C)-(K/R/H)-(L/A), SLK, (R/K)-(L/V/I)-XXXXX-(H/Q)-(L/A/F) (SEQ ID NO: 139). Suitable protein targeting motifs can also be designed or identified using any suitable database or prediction tool, including but not limited to Minimotif Miner (http:minimotifminer.org, http://mitominer.mrc-mbu.cam.ac.uk/release-4.0/embodiment.do?name=Protein %20MTS), LocDB (see above), PTSs predictor ( ), TargetP-2.0 (http://www.cbs.dtu.dk/services/TargetP/), ChloroP (http://www.cbs.dtu.dk/services/ChloroP/); NetNES (http://www.cbs.dtu.dk/services/NetNES/), Predotar (https://urgi.versailles.inra.fr/predotar/), and SignalP (http://www.cbs.dtu.dk/services/SignalP/).

### Selectable Markers and Tags

[0448] One or more of the CRISPR-Cas system polynucleotides can be operably linked, fused to, or otherwise modified to include a polynucleotide that encodes or is a selectable marker or tag, which can be a polynucleotide or polypeptide. In some embodiments, the polypeptide encoding a polypeptide selectable marker can be incorporated in the CRISPR-Cas system polynucleotide such that the selectable marker polypeptide, when translated, is inserted between two amino acids between the N- and C-terminus of the CRISPR-Cas system polypeptide or at the N- and/or C-terminus of the CRISPR-Cas system polypeptide. In some embodiments, the selectable marker or tag is a polynucleotide barcode or unique molecular identifier (UMI).

[0449] It will be appreciated that the polynucleotide encoding such selectable markers or tags can be incorporated into a polynucleotide encoding one or more components of the CRISPR-Cas system described herein in an appropriate manner to allow expression of the selectable marker or tag. Such techniques and methods are described elsewhere herein and will be instantly appreciated by one of ordinary skill in the art in view of this disclosure. Many such selectable markers and tags are generally known in the art and are intended to be within the scope of this disclosure.

[0450] Suitable selectable markers and tags include, but are not limited to, affinity tags, such as chitin binding protein (CBP), maltose binding protein (MBP), glutathione-S-transferase (GST), poly(His) tag; solubilization tags such as thioredoxin (TRX) and poly(NANP), MBP, and GST; chromatography tags such as those consisting of polyanionic amino acids, such as FLAG-tag; epitope tags such as V5-tag, Myc-tag, HA-tag and NE-tag; protein tags that can allow specific enzymatic modification (such as biotinylation by biotin ligase) or chemical modification (such as reaction with FlAsH-EDT2 for fluorescence imaging), DNA and/or RNA segments that contain restriction enzyme or other enzyme cleavage sites; DNA segments that encode products that provide resistance against otherwise toxic compounds including antibiotics, such as, spectinomycin, ampicillin, kanamycin, tetracycline, Basta, neomycin phosphotransferase II (NEO), hygromycin phosphotransferase (HPT)) and the like; DNA and/or RNA segments that encode products that are otherwise lacking in the recipient cell (e.g., tRNA genes, auxotrophic markers); DNA and/or RNA segments that encode products which can be readily identified (e.g., phenotypic markers such as β-galactosidase, GUS; fluorescent proteins such as green fluorescent protein (GFP), cyan (CFP), yellow (YFP), red (RFP), luciferase, and cell surface proteins); polynucleotides that can generate one or more new primer sites for PCR (e.g., the juxtaposition of two DNA sequences not previously juxtaposed), DNA sequences not acted upon or acted upon by a restriction endonuclease or other DNA modifying enzyme, chemical, etc.; epitope tags (e.g. GFP, FLAG- and His-tags), and, DNA sequences that make a molecular barcode or unique molecular identifier (UMI), DNA sequences required for a specific modification (e.g., methylation) that allows its identification. Other suitable markers will be appreciated by those of skill in the art.

[0451] Selectable markers and tags can be operably linked to one or more components of the CRISPR-Cas system described herein via suitable linker, such as a glycine or glycine serine linkers as short as GS or GG up to (GGGGG)₃ (SEQ ID NO: 27) or (GGGGS)₃ (SEQ ID NO: 1). Other suitable linkers are described elsewhere herein.

[0452] The vector or vector system can include one or more polynucleotides encoding one or more targeting moieties. In some embodiments, the targeting moiety encoding polynucleotides can be included in the vector or vector system, such as a viral vector system, such that they are expressed within and/or on the virus particle(s) produced such that the virus particles can be targeted to specific cells, tissues, organs, etc. In some embodiments, the targeting moiety encoding polynucleotides can be included in the vector or vector system such that the CRISPR-Cas system polynucleotide(s) and/or products expressed therefrom include the targeting moiety and can be targeted to specific cells, tissues, organs, etc. In some embodiments, such as non-viral carriers, the targeting moiety can be attached to the carrier (e.g., polymer, lipid, inorganic molecule etc.) and can be capable of targeting the carrier and any attached or associated CRISPR-Cas system polynucleotide(s) to specific cells, tissues, organs, etc.

### Codon Optimization of Vector Polynucleotides

[0453] As described elsewhere herein, the polynucleotide encoding one or more embodiments of the CRISPR-Cas system or component thereof (including but not limited to a Cas protein, accessory molecule, guide molecule, template, etc.) described herein can be codon optimized. In some embodiments, one or more polynucleotides contained in a vector (“vector polynucleotides”) described herein that are in addition to an optionally codon optimized polynucleotide encoding embodiments of the CRISPR-Cas system described herein can be codon optimized. In general, codon optimization refers to a process of modifying a nucleic acid sequence for enhanced expression in the host cells of interest by replacing at least one codon (e.g., about or more than about 1, 2, 3, 4, 5, 10, 15, 20, 25, 50, or more codons) of the native sequence with codons that are more frequently or most frequently used in the genes of that host cell while maintaining the native amino acid sequence. Various species exhibit particular bias for certain codons of a particular amino acid. Codon bias (differences in codon usage between organisms) often correlates with the efficiency of translation of messenger RNA (mRNA), which is in turn believed to be dependent on, among other things, the properties of the codons being translated and the availability of particular transfer RNA (tRNA) molecules. The predominance of selected tRNAs in a cell is generally a reflection of the codons used most frequently in peptide synthesis. Accordingly, genes can be tailored for optimal gene expression in a given organism based on codon optimization. Codon usage tables are readily available, for example, at the “Codon Usage Database” available at www.kazusa.orjp/codon/and these tables can be adapted in a number of ways. See Nakamura, Y., et al. “Codon usage tabulated from the international DNA sequence databases: status for the year 2000” Nucl. Acids Res. 28:292 (2000). Computer algorithms for codon optimizing a particular sequence for expression in a particular host cell are also available, such as Gene Forge (Aptagen; Jacobus, PA), are also available. In some embodiments, one or more codons (e.g., 1, 2, 3, 4, 5, 10, 15, 20, 25, 50, or more, or all codons) in a sequence encoding a DNA/RNA-targeting Cas protein corresponds to the most frequently used codon for a particular amino acid. As to codon usage in yeast, reference is made to the online Yeast Genome database available at http://www.yeastgenome.org/community/codon_usage.shtml, or Codon selection in yeast, Bennetzen and Hall, J Biol Chem. 1982 Mar. 25; 257(6):3026-31. As to codon usage in plants including algae, reference is made to Codon usage in higher plants, green algae, and cyanobacteria, Campbell and Gowri, Plant Physiol. 1990 January; 92(1): 1-11; as well as Codon usage in plant genes, Murray et al, Nucleic Acids Res. 1989 Jan. 25; 17(2):477-98; or Selection on the codon bias of chloroplast and cyanelle genes in different plant and algal lineages, Morton B R, J Mol Evol. 1998 April; 46(4):449-59. For example, SaCas9 has been codon optimized for expression in human. See e.g., WO 2014/093622 (PCT/US2013/074667) as an example of a codon optimized sequence (from knowledge in the art and this disclosure, codon optimizing coding nucleic acid molecule(s), especially as to a Cas effector protein (e.g., Type II-D Cas) is within the ambit of the skilled artisan).

[0454] The vector polynucleotide can be codon optimized for expression in a specific cell-type, tissue type, organ type, and/or subject type. In some embodiments, a codon optimized sequence is a sequence optimized for expression in a eukaryote, e.g., humans (i.e. being optimized for expression in a human or human cell), or for another eukaryote, such as another animal (e.g. a mammal or avian) as is described elsewhere herein. Such codon optimized sequences are within the ambit of the ordinary skilled artisan in view of the description herein. In some embodiments, the polynucleotide is codon optimized for a specific cell type. Such cell types can include, but are not limited to, epithelial cells (including skin cells, cells lining the gastrointestinal tract, cells lining other hollow organs), nerve cells (nerves, brain cells, spinal column cells, nerve support cells (e.g. astrocytes, glial cells, Schwann cells etc.), muscle cells (e.g. cardiac muscle, smooth muscle cells, and skeletal muscle cells), connective tissue cells (fat and other soft tissue padding cells, bone cells, tendon cells, cartilage cells), blood cells, stem cells and other progenitor cells, immune system cells, germ cells, and combinations thereof. Such codon optimized sequences are within the ambit of the ordinary skilled artisan in view of the description herein. In some embodiments, the polynucleotide is codon optimized for a specific tissue type. Such tissue types can include, but are not limited to, muscle tissue, connective tissue, connective tissue, nervous tissue, and epithelial tissue. Such codon optimized sequences are within the ambit of the ordinary skilled artisan in view of the description herein. In some embodiments, the polynucleotide is codon optimized for a specific organ. Such organs include, but are not limited to, muscles, skin, intestines, liver, spleen, brain, lungs, stomach, heart, kidneys, gallbladder, pancreas, bladder, thyroid, bone, blood vessels, blood, and combinations thereof. Such codon optimized sequences are within the ambit of the ordinary skilled artisan in view of the description herein.

[0455] In some embodiments, a vector polynucleotide is codon optimized for expression in particular cells, such as prokaryotic or eukaryotic cells. The eukaryotic cells may be those of or derived from a particular organism, such as a plant or a mammal, including but not limited to human, or non-human eukaryote or animal or mammal as discussed herein, e.g., mouse, rat, rabbit, dog, livestock, or non-human mammal or primate.

### Vector Construction

[0456] The vectors described herein can be constructed using any suitable process or technique. In some embodiments, one or more suitable recombination and/or cloning methods or techniques can be used to the vector(s) described herein. Suitable recombination and/or cloning techniques and/or methods can include, but not limited to, those described in U.S. Patent Publication No. US 2004/0171156 A1. Other suitable methods and techniques are described elsewhere herein.

[0457] Construction of recombinant AAV vectors are described in a number of publications, including U.S. Pat. No. 5,173,414; Tratschin et al., Mol. Cell. Biol. 5:3251-3260 (1985); Tratschin, et al., Mol. Cell. Biol. 4:2072-2081 (1984); Hermonat & Muzyczka, PNAS 81:6466-6470 (1984); and Samulski et al., J. Virol. 63:03822-3828 (1989). Any of the techniques and/or methods can be used and/or adapted for constructing an AAV or other vector described herein. nAAV vectors are discussed elsewhere herein.

[0458] In some embodiments, a vector comprises one or more insertion sites, such as a restriction endonuclease recognition sequence (also referred to as a “cloning site”). In some embodiments, one or more insertion sites (e.g., about or more than about 1, 2, 3, 4, 5, 6, 7, 8, 9, 10, or more insertion sites) are located upstream and/or downstream of one or more sequence elements of one or more vectors. When multiple different guide polynucleotides are used, a single expression construct may be used to target nucleic acid-targeting activity to multiple different, corresponding target sequences within a cell. For example, a single vector may comprise about or more than about 1, 2, 3, 4, 5, 6, 7, 8, 9, 10, 15, 20, or more guide s polynucleotides. In some embodiments, about or more than about 1, 2, 3, 4, 5, 6, 7, 8, 9, 10, or more such guide-polynucleotide-containing vectors may be provided, and optionally delivered to a cell.

[0459] Delivery vehicles, vectors, particles, nanoparticles, formulations and components thereof for expression of one or more elements of a CRISPR-Cas system described herein are as used in the foregoing documents, such as International Patent Publication No. WO 2014/093622 (PCT/US2013/074667) and are discussed in greater detail herein.

### Viral Vectors

[0460] In some embodiments, the vector is a viral vector. The term of art “viral vector” and as used herein in this context refers to polynucleotide based vectors that contain one or more elements from or based upon one or more elements of a virus that can be capable of expressing and packaging a polynucleotide, such as a CRISPR-Cas system polynucleotide of the present invention, into a virus particle and producing said virus particle when used alone or with one or more other viral vectors (such as in a viral vector system). Viral vectors and systems thereof can be used for producing viral particles for delivery of and/or expression of one or more components of the CRISPR-Cas system described herein. The viral vector can be part of a viral vector system involving multiple vectors. In some embodiments, systems incorporating multiple viral vectors can increase the safety of these systems. Suitable viral vectors can include retroviral-based vectors, lentiviral-based vectors, adenoviral-based vectors, adeno associated vectors, helper-dependent adenoviral (HdAd) vectors, hybrid adenoviral vectors, herpes simplex virus-based vectors, poxvirus-based vectors, and Epstein-Barr virus-based vectors. Other embodiments of viral vectors and viral particles produce therefrom are described elsewhere herein. In some embodiments, the viral vectors are configured to produce replication incompetent viral particles for improved safety of these systems.

[0461] In certain embodiments, the virus structural component, which can be encoded by one or more polynucleotides in a viral vector or vector system, comprises one or more capsid proteins including an entire capsid. In certain embodiments, such as wherein a viral capsid comprises multiple copies of different proteins, the delivery system can provide one or more of the same protein or a mixture of such proteins. For example, AAV comprises 3 capsid proteins, VP1, VP2, and VP3, thus delivery systems of the invention can comprise one or more of VP1, and/or one or more of VP2, and/or one or more of VP3. Accordingly, the present invention is applicable to a virus within the family Adenoviridae, such as Atadenovirus, e.g., Ovine atadenovirus D, Aviadenovirus, e.g., Fowl aviadenovirus A, Ichtadenovirus, e.g., Sturgeon ichtadenovirus A, Mastadenovirus (which includes adenoviruses such as all human adenoviruses), e.g., Human mastadenovirus C, and Siadenovirus, e.g., Frog siadenovirus A. Thus, a virus of within the family Adenoviridae is contemplated as within the invention with discussion herein as to adenovirus applicable to other family members. Target-specific AAV capsid variants can be used or selected. Non-limiting examples include capsid variants selected to bind to chronic myelogenous leukemia cells, human CD34 PBPC cells, breast cancer cells, cells of lung, heart, dermal fibroblasts, melanoma cells, stem cell, glioblastoma cells, coronary artery endothelial cells and keratinocytes. See, e.g., Buning et al, 2015, Current Opinion in Pharmacology 24, 94-104. From teachings herein and knowledge in the art as to modifications of adenovirus (see, e.g., U.S. Pat. Nos. 9,410,129, 7,344,872, 7,256,036, 6,911,199, 6,740,525; Matthews, “Capsid-Incorporation of Antigens into Adenovirus Capsid Proteins for a Vaccine Approach,” Mol Pharm, 8(1): 3-11 (2011)), as well as regarding modifications of AAV, the skilled person can readily obtain a modified adenovirus that has a large payload protein or a CRISPR-protein, despite that heretofore it was not expected that such a large protein could be provided on an adenovirus. And as to the viruses related to adenovirus mentioned herein, as well as to the viruses related to AAV mentioned elsewhere herein, the teachings herein as to modifying adenovirus and AAV, respectively, can be applied to those viruses without undue experimentation from this disclosure and the knowledge in the art.

[0462] In some embodiments, the viral vector is configured such that when the cargo is packaged the cargo(s) (e.g., one or more components of the CRISPR-Cas system, including but not limited to a Cas effector, is external to the capsid or virus particle. In the sense that it is not inside the capsid (enveloped or encompassed with the capsid) but is externally exposed so that it can contact the target genomic DNA. In some embodiments, the viral vector is configured such that all the cargo(s) are contained within the capsid after packaging.

### Split Viral Vector Systems

[0463] When the CRISPR-Cas system viral vector or vector system (be it a retroviral (e.g., AAV) or lentiviral vector) is designed so as to position the cargo(s) (e.g., one or more CRISPR-Cas system components) at the internal surface of the capsid once formed, the cargo(s) will fill most or all of internal volume of the capsid. In other embodiments, the CRISPR protein may be modified or divided so as to occupy a less of the capsid internal volume. Accordingly, in certain embodiments, the CRISPR-Cas system or component thereof (e.g., a Cas effector protein) can be divided in two portions, one portion comprises in one viral particle or capsid and the second portion comprised in a second viral particle or capsid. In certain embodiments, by splitting the CRISPR-Cas system or component thereof in two portions, space is made available to link one or more heterologous domains to one or both CRISPR-Cas system component (e.g., Cas protein) portions. Such systems can be referred to as “split vector systems” or in the context of the present disclosure a “split CRISPR-Cas system” a “split CRISPR protein”, a “split Cas protein” and the like. This split protein approach is also described elsewhere herein. When the concept is applied to a vector system, it thus describes putting pieces of the split proteins on different vectors thus reducing the payload of any one vector. This approach can facilitate delivery of systems where the total system size is close to or exceeds the packaging capacity of the vector. This is independent of any regulation of the CRISPR-Cas system that can be achieved with a split system or split protein design.

[0464] Split CRISPR proteins that can be incorporated into the AAV or other vectors described herein are set forth elsewhere herein and in documents incorporated herein by reference in further detail herein. In certain embodiments, each part of a split CRISPR proteins are attached to a member of a specific binding pair, and when bound with each other, the members of the specific binding pair maintain the parts of the CRISPR protein in proximity. In certain embodiments, each part of a split CRISPR protein is associated with an inducible binding pair. An inducible binding pair is one which is capable of being switched “on” or “off” by a protein or small molecule that binds to both members of the inducible binding pair. In general, according to the invention, CRISPR proteins may preferably split between domains, leaving domains intact. Preferred, non-limiting examples of such CRISPR proteins include, without limitation, Cas protein, and orthologues. Preferred, non-limiting examples of split points include, with reference to SpCas9: a split position between 202A/203S; a split position between 255F/256D; a split position between 310E/311I; a split position between 534R/535K; a split position between 572E/573C; a split position between 7135/714G; a split position between 1003L/104E; a split position between 1054G/1055E; a split position between 1114N/11155; a split position between 1152K/1153S; a split position between 1245K/1246G; or a split between 1098 and 1099. Corresponding positions in other Cas proteins, such as the Type II-D Cas proteins of the present invention, can be appreciated in view of these positions made with reference to SpCas9.

[0465] In some embodiments, any AAV serotype is preferred. In some embodiments, the VP2 domain associated with the CRISPR enzyme is an AAV serotype 2 VP2 domain. In some embodiments, the VP2 domain associated with the CRISPR enzyme is an AAV serotype 8 VP2 domain. The serotype can be a mixed serotype as is known in the art.

### Retroviral and Lentiviral Vectors

[0466] Retroviral vectors can be composed of cis-acting long terminal repeats with packaging capacity for up to 6-10 kb of foreign sequence. The minimum cis-acting LTRs are sufficient for replication and packaging of the vectors, which are then used to integrate the therapeutic gene into the target cell to provide permanent transgene expression. Suitable retroviral vectors for the CRISPR-Cas systems can include those based upon murine leukemia virus (MuLV), gibbon ape leukemia virus (GaLV), Simian immunodeficiency virus (SIV), human immunodeficiency virus (HIV), and combinations thereof (see, e.g., Buchscher et al., J. Virol. 66:2731-2739 (1992); Johann et al., J. Virol. 66:1635-1640 (1992); Sommnerfelt et al., Virol. 176:58-59 (1990); Wilson et al., J. Virol. 63:2374-2378 (1989); Miller et al., J. Virol. 65:2220-2224 (1991); PCT/US94/05700). Selection of a retroviral gene transfer system may therefore depend on the target tissue.

[0467] The tropism of a retrovirus can be altered by incorporating foreign envelope proteins, expanding the potential target population of target cells. Lentiviral vectors are retroviral vectors that are able to transduce or infect non-dividing cells and are described in greater detail elsewhere herein. A retrovirus can also be engineered to allow for conditional expression of the inserted transgene, such that only certain cell types are infected by the lentivirus.

[0468] Lentiviruses are complex retroviruses that have the ability to infect and express their genes in both mitotic and post-mitotic cells. Advantages of using a lentiviral approach can include the ability to transduce or infect non-dividing cells and their ability to typically produce high viral titers, which can increase efficiency or efficacy of production and delivery. Suitable lentiviral vectors include, but are not limited to, human immunodeficiency virus (HIV)-based lentiviral vectors, feline immunodeficiency virus (FIV)-based lentiviral vectors, simian immunodeficiency virus (SIV)-based lentiviral vectors, Moloney Murine Leukaemia Virus (Mo-MLV), Visna.maedi virus (VMV)-based lentiviral vector, carpine arthritis-encephalitis virus (CAEV)-based lentiviral vector, bovine immune deficiency virus (BIV)-based lentiviral vector, and Equine infectious anemia (EIAV)-based lentiviral vector. In some embodiments, an HIV-based lentiviral vector system can be used. In some embodiments, a FIV-based lentiviral vector system can be used.

[0469] In some embodiments, the lentiviral vector is an EIAV-based lentiviral vector or vector system. EIAV vectors have been used to mediate expression, packaging, and/or delivery in other contexts, such as for ocular gene therapy (see, e.g., Balagaan, J Gene Med 2006; 8: 275-285). In another embodiment, RetinoStat®, (see, e.g., Binley et al., HUMAN GENE THERAPY 23:980-991 (September 2012)), which describes RetinoStat®, an equine infectious anemia virus-based lentiviral gene therapy vector that expresses angiostatic proteins endostatin and angiostatin that is delivered via a subretinal injection for the treatment of the wet form of age-related macular degeneration. Any of these vectors described in these publications can be modified for the elements of the CRISPR-Cas system described herein.

[0470] In some embodiments, the lentiviral vector or vector system thereof can be a first-generation lentiviral vector or vector system thereof. First-generation lentiviral vectors can contain a large portion of the lentivirus genome, including the gag and pol genes, other additional viral proteins (e.g., VSV-G) and other accessory genes (e.g., vif, vprm vpu, nef, and combinations thereof), regulatory genes (e.g., tat and/or rev) as well as the gene of interest between the LTRs. First generation lentiviral vectors can result in the production of virus particles that can be capable of replication in vivo, which may not be appropriate for some instances or applications.

[0471] In some embodiments, the lentiviral vector or vector system thereof can be a second-generation lentiviral vector or vector system thereof. Second-generation lentiviral vectors do not contain one or more accessory virulence factors and do not contain all components necessary for virus particle production on the same lentiviral vector. This can result in the production of a replication-incompetent virus particle and thus increase the safety of these systems over first-generation lentiviral vectors. In some embodiments, the second-generation vector lacks one or more accessory virulence factors (e.g., vif, vprm, vpu, nef, and combinations thereof). Unlike the first-generation lentiviral vectors, no single second generation lentiviral vector includes all features necessary to express and package a polynucleotide into a virus particle. In some embodiments, the envelope and packaging components are split between two different vectors with the gag, pol, rev, and tat genes being contained on one vector and the envelope protein (e.g., VSV-G) are contained on a second vector. The gene of interest, its promoter, and LTRs can be included on a third vector that can be used in conjunction with the other two vectors (packaging and envelope vectors) to generate a replication-incompetent virus particle.

[0472] In some embodiments, the lentiviral vector or vector system thereof can be a third-generation lentiviral vector or vector system thereof. Third-generation lentiviral vectors and vector systems thereof have increased safety over first- and second-generation lentiviral vectors and systems thereof because, for example, the various components of the viral genome are split between two or more different vectors but used together in vitro to make virus particles, they can lack the tat gene (when a constitutively active promoter is included upstream of the LTRs), and they can include one or more deletions in the 3′LTR to create self-inactivating (SIN) vectors having disrupted promoter/enhancer activity of the LTR. In some embodiments, a third-generation lentiviral vector system can include (i) a vector plasmid that contains the polynucleotide of interest and upstream promoter that are flanked by the 5′ and 3′ LTRs, which can optionally include one or more deletions present in one or both of the LTRs to render the vector self-inactivating; (ii) a “packaging vector(s)” that can contain one or more genes involved in packaging a polynucleotide into a virus particle that is produced by the system (e.g. gag, pol, and rev) and upstream regulatory sequences (e.g. promoter(s)) to drive expression of the features present on the packaging vector, and (iii) an “envelope vector” that contains one or more envelope protein genes and upstream promoters. In certain embodiments, the third-generation lentiviral vector system can include at least two packaging vectors, with the gag-pol being present on a different vector than the rev gene.

[0473] In some embodiments, self-inactivating lentiviral vectors with an siRNA targeting a common exon shared by HIV tat/rev, a nucleolar-localizing TAR decoy, and an anti-CCR5-specific hammerhead ribozyme (see, e.g., DiGiusto et al. (2010) Sci Transl Med 2:36ra43) can be used/and or adapted to the CRISPR-Cas system of the present invention.

[0474] In some embodiments, the pseudotype and infectivity or tropisim of a lentivirus particle can be tuned by altering the type of envelope protein(s) included in the lentiviral vector or system thereof. As used herein, an “envelope protein” or “outer protein” means a protein exposed at the surface of a viral particle that is not a capsid protein. For example, envelope or outer proteins typically comprise proteins embedded in the envelope of the virus. In some embodiments, a lentiviral vector or vector system thereof can include a VSV-G envelope protein. VSV-G mediates viral attachment to an LDL receptor (LDLR) or an LDLR family member present on a host cell, which triggers endocytosis of the viral particle by the host cell. Because LDLR is expressed by a wide variety of cells, viral particles expressing the VSV-G envelope protein can infect or transduce a wide variety of cell types. Other suitable envelope proteins can be incorporated based on the host cell that a user desires to be infected by a virus particle produced from a lentiviral vector or system thereof described herein and can include, but are not limited to, feline endogenous virus envelope protein (RD 114) (see e.g., Hanawa et al. Molec. Ther. 2002 5(3) 242-251), modified Sindbis virus envelope proteins (see e.g., Morizono et al. 2010. J. Virol. 84(14) 6923-6934; Morizono et al. 2001. J. Virol. 75:8016-8020; Morizono et al. 2009. J. Gene Med. 11:549-558; Morizono et al. 2006 Virology 355:71-81; Morizono et al J. Gene Med. 11:655-663, Morizono et al. 2005 Nat. Med. 11:346-352), baboon retroviral envelope protein (see e.g., Girard-Gagnepain et al. 2014. Blood. 124: 1221-1231); Tupaia paramyxovirus glycoproteins (see e.g., Enkirch T. et al., 2013. Gene Ther. 20:16-23); measles virus glycoproteins (see e.g., Funke et al. 2008. Molec. Ther. 16(8): 1427-1436), rabies virus envelope proteins, MLV envelope proteins, Ebola envelope proteins, baculovirus envelope proteins, filovirus envelope proteins, hepatitis E1 and E2 envelope proteins, gp41 and gp120 of HIV, hemagglutinin, neuraminidase, M2 proteins of influenza virus, and combinations thereof.

[0475] In some embodiments, the tropism of the resulting lentiviral particle can be tuned by incorporating cell targeting peptides into a lentiviral vector such that the cell targeting peptides are expressed on the surface of the resulting lentiviral particle. In some embodiments, a lentiviral vector can contain an envelope protein that is fused to a cell targeting protein (see e.g., Buchholz et al. 2015. Trends Biotechnol. 33:777-790; Bender et al. 2016. PLoS Pathog. 12(e1005461); and Friedrich et al. 2013. Mol. Ther. 2013. 21: 849-859.

[0476] In some embodiments, a split-intein-mediated approach to target lentiviral particles to a specific cell type can be used (see e.g., Chamoun-Emaneulli et al. 2015. Biotechnol. Bioeng. 112:2611-2617, Ramirez et al. 2013. Protein. Eng. Des. Sel. 26:215-233. In these embodiments, a lentiviral vector can contain one half of a splicing-deficient variant of the naturally split intein from Nostoc punctiforme fused to a cell targeting peptide and the same or different lentiviral vector can contain the other half of the split intein fused to an envelope protein, such as a binding-deficient, fusion-competent virus envelope protein. This can result in production of a virus particle from the lentiviral vector or vector system that includes a split intein that can function as a molecular Velcro linker to link the cell-binding protein to the pseudotyped lentivirus particle. This approach can be advantageous for use where surface-incompatibilities can restrict the use of, e.g., cell targeting peptides.

[0477] In some embodiments, a covalent-bond-forming protein-peptide pair can be incorporated into one or more of the lentiviral vectors described herein to conjugate a cell targeting peptide to the virus particle (see e.g., Kasaraneni et al. 2018. Sci. Reports (8) No. 10990). In some embodiments, a lentiviral vector can include an N-terminal PDZ domain of InaD protein (PDZ1) and its pentapeptide ligand (TEFCA) (SEQ ID NO: 140) from NorpA, which can conjugate the cell targeting peptide to the virus particle via a covalent bond (e.g., a disulfide bond). In some embodiments, the PDZ1 protein can be fused to an envelope protein, which can optionally be binding deficient and/or fusion competent virus envelope protein and included in a lentiviral vector. In some embodiments, the TEFCA (SEQ ID NO: 140) can be fused to a cell targeting peptide and the TEFCA-CPT fusion construct can be incorporated into the same or a different lentiviral vector as the PDZ1-envelope protein construct. During virus production, specific interaction between the PDZ1 and TEFCA (SEQ ID NO: 140) facilitates producing virus particles covalently functionalized with the cell targeting peptide and thus capable of targeting a specific cell-type based upon a specific interaction between the cell targeting peptide and cells expressing its binding partner. This approach can be advantageous for use where surface-incompatibilities can restrict the use of, e.g., cell targeting peptides.

[0478] Lentiviral vectors have been disclosed as in the treatment for Parkinson's Disease, see, e.g., US Patent Publication No. 20120295960 and U.S. Pat. Nos. 7,303,910 and 7,351,585. Lentiviral vectors have also been disclosed for the treatment of ocular diseases, see e.g., US Patent Publication Nos. 20060281180, 20090007284, US20110117189; US20090017543; US20070054961, US20100317109. Lentiviral vectors have also been disclosed for delivery to the brain, see, e.g., US Patent Publication Nos. US20110293571; US20110293571, US20040013648, US20070025970, US20090111106 and U.S. Pat. No. 7,259,015. Any of these systems or a variant thereof can be used to deliver an CRISPR-Cas system polynucleotide described herein to a cell.

[0479] In some embodiments, a lentiviral vector system can include one or more transfer plasmids. Transfer plasmids can be generated from various other vector backbones and can include one or more features that can work with other retroviral and/or lentiviral vectors in the system that can, for example, improve safety of the vector and/or vector system, increase virial titers, and/or increase or otherwise enhance expression of the desired insert to be expressed and/or packaged into the viral particle. Suitable features that can be included in a transfer plasmid can include, but are not limited to, 5′LTR, 3′LTR, SIN/LTR, origin of replication (Ori), selectable marker genes (e.g., antibiotic resistance genes), Psi (Ψ), RRE (rev response element), cPPT (central polypurine tract), promoters, WPRE (woodchuck hepatitis posttranscriptional regulatory element), SV40 polyadenylation signal, pUC origin, SV40 origin, F1 origin, and combinations thereof.

[0480] In another embodiment, Cocal vesiculovirus envelope pseudotyped retroviral or lentiviral vector particles are contemplated (see, e.g., US Patent Publication No. 20120164118 assigned to the Fred Hutchinson Cancer Research Center). Cocal virus is in the Vesiculovirus genus and is a causative agent of vesicular stomatitis in mammals. Cocal virus was originally isolated from mites in Trinidad (Jonkers et al., Am. J. Vet. Res. 25:236-242 (1964)), and infections have been identified in Trinidad, Brazil, and Argentina from insects, cattle, and horses. Many of the vesiculoviruses that infect mammals have been isolated from naturally infected arthropods, suggesting that they are vector-borne. Antibodies to vesiculoviruses are common among people living in rural areas where the viruses are endemic and laboratory-acquired; infections in humans usually result in influenza-like symptoms. The Cocal virus envelope glycoprotein shares 71.5% identity at the amino acid level with VSV-G Indiana, and phylogenetic comparison of the envelope gene of vesiculoviruses shows that Cocal virus is serologically distinct from, but most closely related to, VSV-G Indiana strains among the vesiculoviruses. Jonkers et al., Am. J. Vet. Res. 25:236-242 (1964) and Travassos da Rosa et al., Am. J. Tropical Med. & Hygiene 33:999-1006 (1984). The Cocal vesiculovirus envelope pseudotyped retroviral vector particles may include for example, lentiviral, alpharetroviral, betaretroviral, gammaretroviral, deltaretroviral, and epsilonretroviral vector particles that may comprise retroviral Gag, Pol, and/or one or more accessory protein(s) and a Cocal vesiculovirus envelope protein. In certain embodiments of these embodiments, the Gag, Pol, and accessory proteins are lentiviral and/or gammaretroviral. In some embodiments, a retroviral vector can contain encoding polypeptides for one or more Cocal vesiculovirus envelope proteins such that the resulting viral or pseudoviral particles are Cocal vesiculovirus envelope pseudotyped.

### Adenoviral Vectors, Helper-Dependent Adenoviral Vectors, and Hybrid Adenoviral Vectors

[0481] In some embodiments, the vector can be an adenoviral vector. In some embodiments, the adenoviral vector can include elements such that the virus particle produced using the vector or system thereof can be serotype 2 or serotype 5. In some embodiments, the polynucleotide to be delivered via the adenoviral particle can be up to about 8 kb. Thus, in some embodiments, an adenoviral vector can include a DNA polynucleotide to be delivered that can range in size from about 0.001 kb to about 8 kb. Adenoviral vectors have been used successfully in several contexts (see e.g., Teramato et al. 2000. Lancet. 355:1911-1912; Lai et al. 2002. DNA Cell. Biol. 21:895-913; Flotte et al., 1996. Hum. Gene. Ther. 7:1145-1159; and Kay et al. 2000. Nat. Genet. 24:257-261.

[0482] In some embodiments, the vector can be a helper-dependent adenoviral vector or system thereof. These are also referred to in the art as “gutless” or “gutted” vectors and are a modified generation of adenoviral vectors (see e.g., Thrasher et al. 2006. Nature. 443:E5-7). In certain embodiments of the helper-dependent adenoviral vector system one vector (the helper) can contain all the viral genes required for replication but contains a conditional gene defect in the packaging domain. The second vector of the system can contain only the ends of the viral genome, one or more CRISPR-Cas polynucleotides, and the native packaging recognition signal, which can allow selective packaged release from the cells (see e.g., Cideciyan et al. 2009. N Engl J Med. 361:725-727). Helper-dependent adenoviral vector systems have been successful for gene delivery in several contexts (see e.g., Simonelli et al. 2010. J Am Soc Gene Ther. 18:643-650; Cideciyan et al. 2009. N Engl J Med. 361:725-727; Crane et al. 2012. Gene Ther. 19(4):443-452; Alba et al. 2005. Gene Ther. 12:18-S27; Croyle et al. 2005. Gene Ther. 12:579-587; Amalfitano et al. 1998. J. Virol. 72:926-933; and Morral et al. 1999. PNAS. 96:12816-12821). The techniques and vectors described in these publications can be adapted for inclusion and delivery of the CRISPR-Cas system polynucleotides described herein. In some embodiments, the polynucleotide to be delivered via the viral particle produced from a helper-dependent adenoviral vector or system thereof can be up to about 37 kb. Thus, in some embodiments, an adenoviral vector can include a DNA polynucleotide to be delivered that can range in size from about 0.001 kb to about 37 kb (see e.g., Rosewell et al. 2011. J. Genet. Syndr. Gene Ther. Suppl. 5:001).

[0483] In some embodiments, the vector is a hybrid-adenoviral vector or system thereof. Hybrid adenoviral vectors are composed of the high transduction efficiency of a gene-deleted adenoviral vector and the long-term genome-integrating potential of adeno-associated, retroviruses, lentivirus, and transposon based-gene transfer. In some embodiments, such hybrid vector systems can result in stable transduction and limited integration site. See e.g., Balague et al. 2000. Blood. 95:820-828; Morral et al. 1998. Hum. Gene Ther. 9:2709-2716; Kubo and Mitani. 2003. J. Virol. 77(5): 2964-2971; Zhang et al. 2013. PloS One. 8(10) e76771; and Cooney et al. 2015. Mol. Ther. 23(4):667-674), whose techniques and vectors described therein can be modified and adapted for use in the CRISPR-Cas system of the present invention. In some embodiments, a hybrid-adenoviral vector can include one or more features of a retrovirus and/or an adeno-associated virus. In some embodiments the hybrid-adenoviral vector can include one or more features of a spuma retrovirus or foamy virus (FV). See e.g., Ehrhardt et al. 2007. Mol. Ther. 15:146-156 and Liu et al. 2007. Mol. Ther. 15:1834-1841, whose techniques and vectors described therein can be modified and adapted for use in the CRISPR-Cas system of the present invention. Advantages of using one or more features from the FVs in the hybrid-adenoviral vector or system thereof can include the ability of the viral particles produced therefrom to infect a broad range of cells, a large packaging capacity as compared to other retroviruses, and the ability to persist in quiescent (non-dividing) cells. See also e.g., Ehrhardt et al. 2007. Mol. Ther. 156:146-156 and Shuji et al. 2011. Mol. Ther. 19:76-82, whose techniques and vectors described therein can be modified and adapted for use in the CRISPR-Cas system of the present invention.

### Adeno Associated Viral (AAV) Vectors

[0484] In an embodiment, the vector can be an adeno-associated virus (AAV) vector. See, e.g., West et al., Virology 160:38-47 (1987); U.S. Pat. No. 4,797,368; WO 93/24641; Kotin, Human Gene Therapy 5:793-801 (1994); and Muzyczka, J. Clin. Invest. 94:1351 (1994). Although similar to adenoviral vectors in some of their features, AAVs have some deficiency in their replication and/or pathogenicity and thus can be safer that adenoviral vectors. In some embodiments the AAV can integrate into a specific site on chromosome 19 of a human cell with no observable side effects. In some embodiments, the capacity of the AAV vector, system thereof, and/or AAV particles can be up to about 4.7 kb. In some embodiments, utilizing homologs of the Cas effector protein that are shorter can be utilized, such for example those in Table 8.

TABLE 8
Exemplary shorter Cas effector homologs.

| Species | Cas9 Size (nt) |
|---|---|
| Corynebacter diphtheriae | 3252 |
| Eubacterium ventriosum | 3321 |
| Streptococcus pasteurianus | 3390 |
| Lactobacillus farciminis | 3378 |
| Sphaerochaeta globus | 3537 |
| Azospirillum B510 | 3504 |
| Gluconacetobacter diazotrophicus | 3150 |
| Neisseria cinerea | 3246 |
| Roseburia intestinalis | 3420 |
| Parvibaculum lavamentivorans | 3111 |
| Staphylococcus aureus | 3159 |
| Nitratifractor salsuginis DSM 16511 | 3396 |
| Campylobacter lari CF89-12 | 3009 |
| Campylobacter jejuni | 2952 |
| Streptococcus thermophilus LMD-9 | 3396 |

[0485] The AAV vector or system thereof can include one or more regulatory molecules. In some embodiments the regulatory molecules can be promoters, enhancers, repressors and the like, which are described in greater detail elsewhere herein. In some embodiments, the AAV vector or system thereof can include one or more polynucleotides that can encode one or more regulatory proteins. In some embodiments, the one or more regulatory proteins can be selected from Rep78, Rep68, Rep52, Rep40, variants thereof, and combinations thereof.

[0486] The AAV vector or system thereof can include one or more polynucleotides that can encode one or more capsid proteins. The capsid proteins can be selected from VP1, VP2, VP3, and combinations thereof. The capsid proteins can be capable of assembling into a protein shell of the AAV virus particle. In some embodiments, the AAV capsid can contain 60 capsid proteins. In some embodiments, the ratio of VP1:VP2:VP3 in a capsid can be about 1:1:10.

[0487] In some embodiments, the AAV vector or system thereof can include one or more adenovirus helper factors or polynucleotides that can encode one or more adenovirus helper factors. Such adenovirus helper factors can include, but are not limited, E1A, E1B, E2A, E4ORF6, and VA RNAs. In some embodiments, a producing host cell line expresses one or more of the adenovirus helper factors.

[0488] The AAV vector or system thereof can be configured to produce AAV particles having a specific serotype. In some embodiments, the serotype can be AAV-1, AAV-2, AAV-3, AAV-4, AAV-5, AAV-6, AAV-8, AAV-9 or any combinations thereof. In some embodiments, the AAV can be AAV1, AAV-2, AAV-5 or any combination thereof. One can select the AAV of the AAV with regard to the cells to be targeted; e.g., one can select AAV serotypes 1, 2, 5 or a hybrid capsid AAV-1, AAV-2, AAV-5 or any combination thereof for targeting brain and/or neuronal cells; and one can select AAV-4 for targeting cardiac tissue; and one can select AAV8 for delivery to the liver. Thus, in some embodiments, an AAV vector or system thereof capable of producing AAV particles capable of targeting the brain and/or neuronal cells can be configured to generate AAV particles having serotypes 1, 2, 5 or a hybrid capsid AAV-1, AAV-2, AAV-5 or any combination thereof. In some embodiments, an AAV vector or system thereof capable of producing AAV particles capable of targeting cardiac tissue can be configured to generate an AAV particle having an AAV-4 serotype. In some embodiments, an AAV vector or system thereof capable of producing AAV particles capable of targeting the liver can be configured to generate an AAV having an AAV-8 serotype. In some embodiments, the AAV vector is a hybrid AAV vector or system thereof. Hybrid AAVs are AAVs that include genomes with elements from one serotype that are packaged into a capsid derived from at least one different serotype. For example, if it is the rAAV2/5 that is to be produced, and if the production method is based on the helper-free, transient transfection method discussed above, the 1st plasmid and the 3rd plasmid (the adeno helper plasmid) will be the same as discussed for rAAV2 production. However, the second plasmid, the pRepCap will be different. In this plasmid, called pRep2/Cap5, the Rep gene is still derived from AAV2, while the Cap gene is derived from AAV5. The production scheme is the same as the above-mentioned approach for AAV2 production. The resulting rAAV is called rAAV2/5, in which the genome is based on recombinant AAV2, while the capsid is based on AAV5. It is assumed the cell or tissue-tropism displayed by this AAV2/5 hybrid virus should be the same as that of AAV5.

[0489] A tabulation of certain AAV serotypes as to these cells can be found in Grimm, D. et al, J. Virol. 82: 5887-5911 (2008), which is recapitulated in Table 9 below.

TABLE 9

| | AAV- | AAV- | AAV- | AAV- | AAV- | AAV- | AAV- | AAV- |
|---|---|---|---|---|---|---|---|---|
| Cell Line | 1 | 2 | 3 | 4 | 5 | 6 | 8 | 9 |
| Huh-7 | 13 | 100 | 2.5 | 0.0 | 0.1 | 10 | 0.7 | 0.0 |
| HEK293 | 25 | 100 | 2.5 | 0.1 | 0.1 | 5 | 0.7 | 0.1 |
| HeLa | 3 | 100 | 2.0 | 0.1 | 6.7 | 1 | 0.2 | 0.1 |
| HepG2 | 3 | 100 | 16.7 | 0.3 | 1.7 | 5 | 0.3 | ND |
| Hep1A | 20 | 100 | 0.2 | 1.0 | 0.1 | 1 | 0.2 | 0.0 |
| 911 | 17 | 100 | 11 | 0.2 | 0.1 | 17 | 0.1 | ND |
| CHO | 100 | 100 | 14 | 1.4 | 333 | 50 | 10 | 1.0 |
| COS | 33 | 100 | 33 | 3.3 | 5.0 | 14 | 2.0 | 0.5 |
| MeWo | 10 | 100 | 20 | 0.3 | 6.7 | 10 | 1.0 | 0.2 |
| NIH3T3 | 10 | 100 | 2.9 | 2.9 | 0.3 | 10 | 0.3 | ND |
| A549 | 14 | 100 | 20 | ND | 0.5 | 10 | 0.5 | 0.1 |
| HT1180 | 20 | 100 | 10 | 0.1 | 0.3 | 33 | 0.5 | 0.1 |
| Monocytes | 1111 | 100 | ND | ND | 125 | 1429 | ND | ND |
| Immature | 2500 | 100 | ND | ND | 222 | 2857 | ND | ND |
| DC | | | | | | | | |
| Mature DC | 2222 | 100 | ND | ND | 333 | 3333 | ND | ND |

[0490] In some embodiments, the AAV vector or system thereof is configured as a “gutless” vector, similar to that described in connection with a retroviral vector. In some embodiments, the “gutless” AAV vector or system thereof can have the cis-acting viral DNA elements involved in genome amplification and packaging in linkage with the heterologous sequences of interest (e.g. the CRISPR-Cas system polynucleotide(s)).

[0491] In some embodiments, the AAV vectors are produced in in insect cells, e.g., Spodoptera frugiperda Sf9 insect cells, grown in serum-free suspension culture. Serum-free insect cells can be purchased from commercial vendors, e.g., Sigma Aldrich (EX-CELL 405).

[0492] In some embodiments, an AAV vector or vector system can contain or consists essentially of one or more polynucleotides encoding one or more components of a CRISPR system. In some embodiments, the AAV vector or vector system can contain a plurality of cassettes comprising or consisting a first cassette comprising or consisting essentially of a promoter, a nucleic acid molecule encoding a CRISPR-associated (Cas) protein (putative nuclease or helicase proteins), e.g., a Cas protein and a terminator, and a two, or more, advantageously up to the packaging size limit of the vector, e.g., in total (including the first cassette) five, cassettes comprising or consisting essentially of a promoter, nucleic acid molecule encoding guide RNA (gRNA) and a terminator (e.g., each cassette schematically represented as Promoter-gRNA1-terminator, Promoter-gRNA2-terminator . . . Promoter-gRNA(N)-terminator (where N is a number that can be inserted that is at an upper limit of the packaging size limit of the vector), or two or more individual rAAVs, each containing one or more than one cassette of a CRISPR system, e.g., a first rAAV containing the first cassette comprising or consisting essentially of a promoter, a nucleic acid molecule encoding Cas, e.g., a Cas and a terminator, and a second rAAV containing a plurality, four, cassettes comprising or consisting essentially of a promoter, nucleic acid molecule encoding guide RNA (gRNA) and a terminator (e.g., each cassette schematically represented as Promoter-gRNA1-terminator, Promoter-gRNA2-terminator . . . Promoter-gRNA(N)-terminator (where N is a number that can be inserted that is at an upper limit of the packaging size limit of the vector). As rAAV is a DNA virus, the nucleic acid molecules in the herein discussion concerning AAV or rAAV are advantageously DNA. In some embodiments, the promoter is a tissue specific promoter or another tissue specific regulatory element. Suitable tissue specific regulatory elements, including promoters, are described in greater detail elsewhere herein.

[0493] In another embodiment, the invention provides a non-naturally occurring or engineered CRISPR protein associated with Adeno Associated Virus (AAV), e.g., an AAV comprising a CRISPR protein as a fusion, with or without a linker, to or with an AAV capsid protein such as VP1, VP2, and/or VP3; and, for shorthand purposes, such a non-naturally occurring or engineered CRISPR protein is herein termed a “AAV-CRISPR protein” More in particular, modifying the knowledge in the art, e.g., Rybniker et al., “Incorporation of Antigens into Viral Capsids Augments Immunogenicity of Adeno-Associated Virus Vector-Based Vaccines,” J Virol. December 2012; 86(24): 13800-13804, Lux K, et al. 2005. Green fluorescent protein-tagged adeno-associated virus particles allow the study of cytosolic and nuclear trafficking. J. Virol. 79:11776-11787, Munch R C, et al. 2012. “Displaying high-affinity ligands on adeno-associated viral vectors enables tumor cell-specific and safe gene transfer.” Mol. Ther. [Epub ahead of print.] doi:10.1038/mt.2012.186 and Warrington K H, Jr, et al. 2004. Adeno-associated virus type 2 VP2 capsid protein is nonessential and can tolerate large peptide insertions at its N terminus. J. Virol. 78:6595-6609, each incorporated herein by reference, one can obtain a modified AAV capsid of the invention. It will be understood by those skilled in the art that the modifications described herein if inserted into the AAV cap gene may result in modifications in the VP1, VP2 and/or VP3 capsid subunits. Alternatively, the capsid subunits can be expressed independently to achieve modification in only one or two of the capsid subunits (VP1, VP2, VP3, VP1+VP2, VP1+VP3, or VP2+VP3). One can modify the cap gene to have expressed at a desired location a non-capsid protein advantageously a large payload protein, such as a CRISPR-protein. Likewise, these can be fusions, with the protein, e.g., large payload protein such as a CRISPR-protein fused in a manner analogous to prior art fusions. See, e.g., US Patent Publication 20090215879; Nance et al., “Perspective on Adeno-Associated Virus Capsid Modification for Duchenne Muscular Dystrophy Gene Therapy,” Hum Gene Ther. 26(12):786-800 (2015) and documents cited therein, incorporated herein by reference. The skilled person, from this disclosure and the knowledge in the art can make and use modified AAV or AAV capsid as in the herein invention, and through this disclosure one knows now that large payload proteins can be fused to the AAV capsid. Applicants provide AAV capsid-CRISPR protein (e.g., Cas, (e.g. Type II-D Cas), dCas (e.g. dType II-D Cas) fusions and those AAV-capsid CRISPR protein (e.g., Type II-D Cas) fusions can be a recombinant AAV that contains nucleic acid molecule(s) encoding or providing CRISPR-Cas or CRISPR system or complex RNA guide(s), whereby the CRISPR protein (e.g., Type II-D Cas) fusion delivers a CRISPR-Cas or CRISPR system complex (e.g., the CRISPR protein or Cas (e.g. Type II-D Cas) is provided by the fusion, e.g., VP1, VP2, or VP3 fusion, and the guide RNA is provided by the coding of the recombinant virus, whereby in vivo, in a cell, the CRISPR-Cas or CRISPR system is assembled from the nucleic acid molecule(s) of the recombinant providing the guide RNA and the outer surface of the virus providing the CRISPR-Enzyme (e.g., Type II-D Cas). Such as complex may herein be termed an “AAV-CRISPR system” or an “AAV-CRISPR-Cas” or “AAV-CRISPR complex” or AAV-CRISPR-Cas complex.” Accordingly, the instant invention is also applicable to a virus in the genus Dependoparvovirus or in the family Parvoviridae, for instance, AAV, or a virus of Amdoparvovirus, e.g., Carnivore amdoparvovirus 1, a virus of Aveparvovirus, e.g., Galliform aveparvovirus 1, a virus of Bocaparvovirus, e.g., Ungulate bocaparvovirus 1, a virus of Copiparvovirus, e.g., Ungulate copiparvovirus 1, a virus of Dependoparvovirus, e.g., Adeno-associated dependoparvovirus A, a virus of Erythroparvovirus, e.g., Primate erythroparvovirus 1, a virus of Protoparvovirus, e.g., Rodent protoparvovirus 1, a virus of Tetraparvovirus, e.g., Primate tetraparvovirus 1. Thus, a virus of within the family Parvoviridae or the genus Dependoparvovirus or any of the other foregoing genera within Parvoviridae is contemplated as within the invention with discussion herein as to AAV applicable to such other viruses.

[0494] In some embodiments, the CRISPR enzyme is external to the capsid or virus particle. In the sense that it is not inside the capsid (enveloped or encompassed with the capsid), but is externally exposed so that it can contact the target genomic DNA). In some embodiments, the CRISPR enzyme is associated with the AAV VP2 domain by way of a fusion protein. In some embodiments, the association may be considered to be a modification of the VP2 domain. Where reference is made herein to a modified VP2 domain, then this will be understood to include any association discussed herein of the VP2 domain and the CRISPR enzyme. In some embodiments, the AAV VP2 domain may be associated (or tethered) to the CRISPR enzyme via a connector protein, for example using a system such as the streptavidin-biotin system. In an embodiment, the present invention provides a polynucleotide encoding the present CRISPR enzyme and associated AAV VP2 domain. In one embodiment, the invention provides a non-naturally occurring modified AAV having a VP2-CRISPR enzyme capsid protein, wherein the CRISPR enzyme is part of or tethered to the VP2 domain. In some preferred embodiments, the CRISPR enzyme is fused to the VP2 domain so that, in another embodiment, the invention provides a non-naturally occurring modified AAV having a VP2-CRISPR enzyme fusion capsid protein. Thus, reference herein to a VP2-CRISPR enzyme capsid protein may also include a VP2-CRISPR enzyme fusion capsid protein. In some embodiments, the VP2-CRISPR enzyme capsid protein further comprises a linker, whereby the VP2-CRISPR enzyme is distanced from the remainder of the AAV. In some embodiments, the VP2-CRISPR enzyme capsid protein further comprises at least one protein complex, e.g., CRISPR complex, such as a CRISPR-Cas complex guide RNA that targets a particular DNA, TALE, etc. A CRISPR complex, such as CRISPR-Cas system comprising the VP2-CRISPR enzyme capsid protein and at least one CRISPR complex, such as a CRISPR-Cas complex guide RNA that targets a particular DNA, is also provided in one embodiment.

[0495] In one embodiment, the invention provides a non-naturally occurring or engineered composition comprising a CRISPR enzyme which is part of or tethered to an AAV capsid domain, i.e., VP1, VP2, or VP3 domain of Adeno-Associated Virus (AAV) capsid. In some embodiments, part of or tethered to an AAV capsid domain includes associated with associated with a AAV capsid domain. In some embodiments, the CRISPR enzyme may be fused to the AAV capsid domain. In some embodiments, the fusion may be to the N-terminal end of the AAV capsid domain. As such, in some embodiments, the C-terminal end of the CRISPR enzyme is fused to the N-terminal end of the AAV capsid domain. In some embodiments, an NLS and/or a linker (such as a GlySer linker) may be positioned between the C-terminal end of the CRISPR enzyme and the N-terminal end of the AAV capsid domain. In some embodiments, the fusion may be to the C-terminal end of the AAV capsid domain. In some embodiments, this is not preferred due to the fact that the VP1, VP2 and VP3 domains of AAV are alternative splices of the same RNA and so a C-terminal fusion may affect all three domains. In some embodiments, the AAV capsid domain is truncated. In some embodiments, some or all of the AAV capsid domain is removed. In some embodiments, some of the AAV capsid domain is removed and replaced with a linker (such as a GlySer linker), typically leaving the N-terminal and C-terminal ends of the AAV capsid domain intact, such as the first 2, 5 or 10 amino acids. In this way, the internal (non-terminal) portion of the VP3 domain may be replaced with a linker. It is particularly preferred that the linker is fused to the CRISPR protein. A branched linker may be used, with the CRISPR protein fused to the end of one of the branches. This allows for some degree of spatial separation between the capsid and the CRISPR protein. In this way, the CRISPR protein is part of (or fused to) the AAV capsid domain.

[0496] In other embodiments, the CRISPR enzyme may be fused in frame within, i.e. internal to, the AAV capsid domain. Thus, in some embodiments, the AAV capsid domain again preferably retains its N-terminal and C-terminal ends. In this case, a linker is preferred, in some embodiments, either at one or both ends of the CRISPR enzyme. In this way, the CRISPR enzyme is again part of (or fused to) the AAV capsid domain. In certain embodiments, the positioning of the CRISPR enzyme is such that the CRISPR enzyme is at the external surface of the viral capsid once formed. In one embodiment, the invention provides a non-naturally occurring or engineered composition comprising a CRISPR enzyme associated with a AAV capsid domain of Adeno-Associated Virus (AAV) capsid. Here, associated may mean in some embodiments fused, or in some embodiments bound to, or in some embodiments tethered to. The CRISPR protein may, in some embodiments, be tethered to the VP1, VP2, or VP3 domain. This may be via a connector protein or tethering system such as the biotin-streptavidin system. In one example, a biotinylation sequence (15 amino acids) could therefore be fused to the CRISPR protein. When a fusion of the AAV capsid domain, especially the N-terminus of the AAV AAV capsid domain, with streptavidin is also provided, the two will therefore associate with very high affinity. Thus, in some embodiments, provided is a composition or system comprising a CRISPR protein-biotin fusion and a streptavidin-AAV capsid domain arrangement, such as a fusion. The CRISPR protein-biotin and streptavidin-AAV capsid domain forms a single complex when the two parts are brought together. NLSs may also be incorporated between the CRISPR protein and the biotin; and/or between the streptavidin and the AAV capsid domain.

[0497] As such, provided is a fusion of a CRISPR enzyme with a connector protein specific for a high affinity ligand for that connector, whereas the AAV VP2 domain is bound to said high affinity ligand. For example, streptavidin may be the connector fused to the CRISPR enzyme, while biotin may be bound to the AAV VP2 domain. Upon co-localization, the streptavidin will bind to the biotin, thus connecting the CRISPR enzyme to the AAV VP2 domain. The reverse arrangement is also possible. In some embodiments, a biotinylation sequence (15 amino acids) could therefore be fused to the AAV VP2 domain, especially the N-terminus of the AAV VP2 domain. A fusion of the CRISPR enzyme with streptavidin is also preferred, in some embodiments. In some embodiments, the biotinylated AAV capsids with streptavidin-CRISPR enzyme are assembled in vitro. This way the AAV capsids should assemble in a straightforward manner and the CRISPR enzyme-streptavidin fusion can be added after assembly of the capsid. In other embodiments a biotinylation sequence (15 amino acids) could therefore be fused to the CRISPR enzyme, together with a fusion of the AAV VP2 domain, especially the N-terminus of the AAV VP2 domain, with streptavidin. For simplicity, a fusion of the CRISPR enzyme and the AAV VP2 domain is preferred in some embodiments. In some embodiments, the fusion may be to the N-terminal end of the CRISPR enzyme. In other words, in some embodiments, the AAV and CRISPR enzyme are associated via fusion. In some embodiments, the AAV and CRISPR enzyme are associated via fusion including a linker. Suitable linkers are discussed herein and include, but are not limited to, Gly Ser linkers. Fusion to the N-term of AAV VP2 domain is preferred, in some embodiments. In some embodiments, the CRISPR enzyme comprises at least one Nuclear Localization Signal (NLS). In a further embodiment, the present invention provides compositions comprising the CRISPR enzyme and associated AAV VP2 domain or the polynucleotides or vectors described herein. Such compositions and formulations are discussed elsewhere herein.

[0498] An alternative tether may be to fuse or otherwise associate the AAV capsid domain to an adaptor protein which binds to or recognizes to a corresponding RNA sequence or motif. In some embodiments, the adaptor is or comprises a binding protein which recognizes and binds (or is bound by) an RNA sequence specific for said binding protein. In some embodiments, a preferred example is the MS2 (see e.g., Konermann et al. December 2014, cited infra, incorporated herein by reference) binding protein which recognizes and binds (or is bound by) an RNA sequence specific for the MS2 protein.

[0499] With the AAV capsid domain associated with the adaptor protein, the CRISPR protein may, in some embodiments, be tethered to the adaptor protein of the AAV capsid domain. The CRISPR protein may, in some embodiments, be tethered to the adaptor protein of the AAV capsid domain via the CRISPR enzyme being in a complex with a modified guide, see Konermann et al. The modified guide is, in some embodiments, a sgRNA. In some embodiments, the modified guide comprises a distinct RNA sequence; see, e.g., International Patent Application No. PCT/US14/70175, incorporated herein by reference.

[0500] In some embodiments, distinct RNA sequence is an aptamer. Thus, corresponding aptamer-adaptor protein systems are preferred. One or more functional domains may also be associated with the adaptor protein. An example of a preferred arrangement would be: [AAV AAV capsid domain-adaptor protein]-[modified guide-CRISPR protein]

[0501] In certain embodiments, the positioning of the CRISPR protein is such that the CRISPR protein is at the internal surface of the viral capsid once formed. In one embodiment, the invention provides a non-naturally occurring or engineered composition comprising a CRISPR protein associated with an internal surface of an AAV capsid domain. Here again, associated may mean in some embodiments fused, or in some embodiments bound to, or in some embodiments tethered to. The CRISPR protein may, in some embodiments, be tethered to the VP1, VP2, or VP3 domain such that it locates to the internal surface of the viral capsid once formed. This may be via a connector protein or tethering system such as the biotin-streptavidin system as described above and/or elsewhere herein.

[0502] In one embodiment, the invention provides an engineered, non-naturally occurring CRISPR-Cas system comprising a AAV-Cas protein and a guide RNA that targets a DNA molecule encoding a gene product in a cell, whereby the guide RNA targets the DNA molecule encoding the gene product and the Cas protein cleaves the DNA molecule encoding the gene product, whereby expression of the gene product is altered; and, wherein the Cas protein and the guide RNA do not naturally occur together. The invention comprehends the guide RNA comprising a guide sequence fused to a tracr sequence. In a preferred embodiment the Cas protein is a Cas protein. In some embodiments, the polynucleotide encoding the Cas protein is codon optimized for expression in a eukaryotic cell. In some embodiments, the eukaryotic cell is a mammalian cell and in a more preferred embodiment the mammalian cell is a human cell. In a further embodiment, the expression of the gene product is decreased.

[0503] In another embodiment, the invention provides an engineered, non-naturally occurring vector system comprising one or more vectors comprising a first regulatory element operably linked to a CRISPR-Cas system guide RNA that targets a DNA molecule encoding a gene product and an AAV-Cas protein. The components may be located on same or different vectors of the system or may be the same vector whereby the AAV-Cas protein also delivers the RNA of the CRISPR system. The guide RNA targets the DNA molecule encoding the gene product in a cell and the AAV-Cas protein may cleaves the DNA molecule encoding the gene product (it may cleave one or both strands or have substantially no nuclease activity), whereby expression of the gene product is altered; and, wherein the AAV-Cas protein and the guide RNA do not naturally occur together. The invention comprehends the guide RNA comprising a guide sequence fused to a tracr sequence. In an embodiment of the invention the AAV-Cas protein is a type II AAV-CRISPR-Cas protein and in a preferred embodiment the AAV-Cas protein is an AAV-Cas protein. The invention further comprehends the coding for the AAV-Cas protein being codon optimized for expression in a eukaryotic cell. In a preferred embodiment the eukaryotic cell is a mammalian cell and in a more preferred embodiment the mammalian cell is a human cell. In a further embodiment of the invention, the expression of the gene product is decreased.

[0504] In one embodiment, the invention provides a vector system comprising one or more vectors. In some embodiments, the system comprises: (a) a first regulatory element operably linked to a tracr mate sequence and one or more insertion sites for inserting one or more guide sequences upstream of the tracr mate sequence, wherein when expressed, the guide sequence directs sequence-specific binding of a AAV-CRISPR complex to a target sequence in a eukaryotic cell, wherein the CRISPR complex comprises a AAV-CRISPR enzyme complexed with (1) the guide sequence that is hybridized to the target sequence, and (2) the tracr mate sequence that is hybridized to the tracr sequence; and (b) said AAV-CRISPR enzyme comprising at least one nuclear localization sequence and/or at least one NES; wherein components (a) and (b) are located on or in the same or different vectors of the system. In some embodiments, component (a) further comprises the tracr sequence downstream of the tracr mate sequence under the control of the first regulatory element. In some embodiments, component (a) further comprises two or more guide sequences operably linked to the first regulatory element, wherein when expressed, each of the two or more guide sequences direct sequence specific binding of an AAV-CRISPR complex to a different target sequence in a eukaryotic cell. In some embodiments, the system comprises the tracr sequence under the control of a third regulatory element, such as a polymerase III promoter. In some embodiments, the tracr sequence exhibits at least 50%, 60%, 70%, 80%, 90%, 95%, or 99% of sequence complementarity along the length of the tracr mate sequence when optimally aligned. Determining optimal alignment is within the purview of one of skill in the art. For example, there are publicly and commercially available alignment algorithms and programs such as, but not limited to, Clustal W, Smith-Waterman in matlab, Bowtie, Geneious, Biopython and SeqMan. In some embodiments, the AAV-CRISPR complex comprises one or more nuclear localization sequences of sufficient strength to drive accumulation of said CRISPR complex in a detectable amount in the nucleus of a eukaryotic cell. Without wishing to be bound by theory, it is believed that a nuclear localization sequence is not necessary for AAV-CRISPR complex activity in eukaryotes, but that including such sequences enhances activity of the system, especially as to targeting nucleic acid molecules in the nucleus and/or having molecules exit the nucleus. In some embodiments, the AAV-CRISPR enzyme is an AAV-Cas enzyme. In some embodiments, the AAV-Cas enzyme is derived from S. pneumoniae, S. pyogenes, S. thermophiles, F. novicida or S. aureus Type II-D Cas (e.g., a Cas protein of one of these organisms modified to have or be associated with at least one AAV) and may include further mutations or alterations or be a chimeric Cas9. The enzyme may be an AAV-Type II-D Cas homolog or ortholog. In some embodiments, the AAV-CRISPR enzyme is codon-optimized for expression in a eukaryotic cell. In some embodiments, the AAV-CRISPR enzyme directs cleavage of one or two strands at the location of the target sequence. In some embodiments, the AAV-CRISPR enzyme lacks DNA strand cleavage activity. In some embodiments, the first regulatory element is a polymerase III promoter. In some embodiments, the second regulatory element is a polymerase II promoter. In some embodiments, the guide sequence is at least 15, 16, 17, 18, 19, 20, 25 nucleotides, or between 10-30, or between 15-25, or between 15-20 nucleotides in length.

[0505] In general, in some embodiments, the AAV further comprises a repair template. It will be appreciated that comprises here may mean encompassed within the viral capsid or that the virus encodes the comprised protein. In some embodiments, one or more, preferably two or more guide RNAs, may be comprised/encompassed within the AAV vector. Two may be preferred, in some embodiments, as it allows for multiplexing or dual nickase approaches. Particularly for multiplexing, two or more guides may be used. In fact, in some embodiments, three or more, four or more, five or more, or even six or more guide RNAs may be comprised/encompassed within the AAV. More space has been freed up within the AAV by virtue of the fact that the AAV no longer needs to comprise/encompass the CRISPR enzyme. In each of these instances, a repair template may also be provided comprised/encompassed within the AAV. In some embodiments, the repair template corresponds to or includes the DNA target.

### Herpes Simplex Viral Vectors

[0506] In some embodiments, the vector can be a Herpes Simplex Viral (HSV)-based vector or system thereof. HSV systems can include the disabled infections single copy (DISC) viruses, which are composed of a glycoprotein H defective mutant HSV genome. When the defective HSV is propagated in complementing cells, virus particles can be generated that are capable of infecting subsequent cells permanently replicating their own genome but are not capable of producing more infectious particles. See e.g., 2009. Trobridge. Exp. Opin. Biol. Ther. 9:1427-1436, whose techniques and vectors described therein can be modified and adapted for use in the CRISPR-Cas system of the present invention. In some embodiments where an HSV vector or system thereof is utilized, the host cell can be a complementing cell. In some embodiments, HSV vector or system thereof can be capable of producing virus particles capable of delivering a polynucleotide cargo of up to 150 kb. Thus, in some embodiment the CRISPR-Cas system polynucleotide(s) included in the HSV-based viral vector or system thereof can sum from about 0.001 to about 150 kb. HSV-based vectors and systems thereof have been successfully used in several contexts including various models of neurologic disorders. See e.g., Cockrell et al. 2007. Mol. Biotechnol. 36:184-204; Kafri T. 2004. Mol. Biol. 246:367-390; Balaggan and Ali. 2012. Gene Ther. 19:145-153; Wong et al. 2006. Hum. Gen. Ther. 2002. 17:1-9; Azzouz et al. J. Neruosci. 22L10302-10312; and Betchen and Kaplitt. 2003. Curr. Opin. Neurol. 16:487-493, whose techniques and vectors described therein can be modified and adapted for use in the CRISPR-Cas system of the present invention.

### Poxvirus Vectors

[0507] In some embodiments, the vector can be a poxvirus vector or system thereof. In some embodiments, the poxvirus vector can result in cytoplasmic expression of one or more CRISPR-Cas system polynucleotides of the present invention. In some embodiments the capacity of a poxvirus vector or system thereof can be about 25 kb or more. In some embodiments, a poxvirus vector or system thereof can include one or more CRISPR-Cas system polynucleotides described herein.

### Viral Vectors for Delivery to Plants

[0508] The systems and compositions may be delivered to plant cells using viral vehicles. In particular embodiments, the compositions and systems may be introduced in the plant cells using a plant viral vector (e.g., as described in Scholthof et al. 1996, Annu Rev Phytopathol. 1996; 34:299-323). Such viral vector may be a vector from a DNA virus, e.g., geminivirus (e.g., cabbage leaf curl virus, bean yellow dwarf virus, wheat dwarf virus, tomato leaf curl virus, maize streak virus, tobacco leaf curl virus, or tomato golden mosaic virus) or nanovirus (e.g., Faba bean necrotic yellow virus). The viral vector may be a vector from an RNA virus, e.g., tobravirus (e.g., tobacco rattle virus, tobacco mosaic virus), potexvirus (e.g., potato virus X), or hordeivirus (e.g., barley stripe mosaic virus). The replicating genomes of plant viruses may be non-integrative vectors.

Virus Particle Production from Viral Vectors

### Retroviral Production

[0509] In some embodiments, one or more viral vectors and/or system thereof can be delivered to a suitable cell line for production of virus particles containing the polynucleotide or other payload to be delivered to a host cell. Suitable host cells for virus production from viral vectors and systems thereof described herein are known in the art and are commercially available. For example, suitable host cells include HEK 293 cells and its variants (HEK 293T and HEK 293TN cells). In some embodiments, the suitable host cell for virus production from viral vectors and systems thereof described herein can stably express one or more genes involved in packaging (e.g. pol, gag, and/or VSV-G) and/or other supporting genes.

[0510] In some embodiments, after delivery of one or more viral vectors to the suitable host cells for or virus production from viral vectors and systems thereof, the cells are incubated for an appropriate length of time to allow for viral gene expression from the vectors, packaging of the polynucleotide to be delivered (e.g., an CRISPR-Cas system polynucleotide), and virus particle assembly, and secretion of mature virus particles into the culture media. Various other methods and techniques are generally known to those of ordinary skill in the art.

[0511] Mature virus particles can be collected from the culture media by a suitable method. In some embodiments, this can involve centrifugation to concentrate the virus. The titer of the composition containing the collected virus particles can be obtained using a suitable method. Such methods can include transducing a suitable cell line (e.g., NIH 3T3 cells) and determining transduction efficiency, infectivity in that cell line by a suitable method. Suitable methods include PCR-based methods, flow cytometry, and antibiotic selection-based methods. Various other methods and techniques are generally known to those of ordinary skill in the art. The concentration of virus particle can be adjusted as needed. In some embodiments, the resulting composition containing virus particles can contain 1×10¹-1×10²⁰ particles/mL.

[0512] Lentiviruses may be prepared from any lentiviral vector or vector system described herein. In one example embodiment, after cloning pCasES10 (which contains a lentiviral transfer plasmid backbone), HEK293FT at low passage (p=5) can be seeded in a T-75 flask to 50% confluence the day before transfection in DMEM with 10% fetal bovine serum and without antibiotics. After 20 hours, the media can be changed to OptiMEM (serum-free) media and transfection of the lentiviral vectors can done 4 hours later. Cells can be transfected with 10 μg of lentiviral transfer plasmid (pCasES10) and the appropriate packaging plasmids (e.g., 5 μg of pMD2.G (VSV-g pseudotype), and 7.5 ug of psPAX2 (gag/pol/rev/tat)). Transfection can be carried out in 4 mL OptiMEM with a cationic lipid delivery agent (50 uL Lipofectamine 2000 and 100 ul Plus reagent). After 6 hours, the media can be changed to antibiotic-free DMEM with 10% fetal bovine serum. These methods can use serum during cell culture, but serum-free methods are preferred.

[0513] Following transfection and allowing the producing cells (also referred to as packaging cells) to package and produce virus particles with packaged cargo, the lentiviral particles can be purified. In an exemplary embodiment, virus-containing supernatants can be harvested after 48 hours. Collected virus-containing supernatants can first be cleared of debris and filtered through a 0.45 um low protein binding (PVDF) filter. They can then be spun in an ultracentrifuge for 2 hours at 24,000 rpm. The resulting virus-containing pellets can be resuspended in 50 ul of DMEM overnight at 4 degrees C. They can be then aliquoted and used immediately or immediately frozen at −80 degrees C. for storage.

### AAV Particle Production

[0514] There are two main strategies for producing AAV particles from AAV vectors and systems thereof, such as those described herein, which depend on how the adenovirus helper factors are provided (helper v. helper free). In some embodiments, a method of producing AAV particles from AAV vectors and systems thereof can include adenovirus infection into cell lines that stably harbor AAV replication and capsid encoding polynucleotides along with AAV vector containing the polynucleotide to be packaged and delivered by the resulting AAV particle (e.g., the CRISPR-Cas system polynucleotide(s)). In some embodiments, a method of producing AAV particles from AAV vectors and systems thereof can be a “helper free” method, which includes co-transfection of an appropriate producing cell line with three vectors (e.g., plasmid vectors): (1) an AAV vector that contains a polynucleotide of interest (e.g. the CRISPR-Cas system polynucleotide(s)) between 2 ITRs; (2) a vector that carries the AAV Rep-Cap encoding polynucleotides; and (helper polynucleotides. One of skill in the art will appreciate various methods and variations thereof that are both helper and -helper free and as well as the different advantages of each system.

### Non-Viral Vectors

[0515] In some embodiments, the vector is a non-viral vector or vector system. The term of art “Non-viral vector” and as used herein in this context refers to molecules and/or compositions that are vectors but that are not based on one or more component of a virus or virus genome (excluding any nucleotide to be delivered and/or expressed by the non-viral vector) that can be capable of incorporating CRISPR-Cas polynucleotide(s) and delivering said CRISPR-Cas polynucleotide(s) to a cell and/or expressing the polynucleotide in the cell. It will be appreciated that this does not exclude vectors containing a polynucleotide designed to target a virus-based polynucleotide that is to be delivered. For example, if a gRNA to be delivered is directed against a virus component and it is inserted or otherwise coupled to an otherwise non-viral vector or carrier, this would not make said vector a “viral vector”. Non-viral vectors can include, without limitation, naked polynucleotides and polynucleotide (non-viral) based vector and vector systems.

### Naked Polynucleotides

[0516] In some embodiments one or more CRISPR-Cas system polynucleotides described elsewhere herein can be included in a naked polynucleotide. The term of art “naked polynucleotide” as used herein refers to polynucleotides that are not associated with another molecule (e.g., proteins, lipids, and/or other molecules) that can often help protect it from environmental factors and/or degradation. As used herein, associated with includes, but is not limited to, linked to, adhered to, adsorbed to, enclosed in, enclosed in or within, mixed with, and the like. Naked polynucleotides that include one or more of the CRISPR-Cas system polynucleotides described herein can be delivered directly to a host cell and optionally expressed therein. The naked polynucleotides can have any suitable two- and three-dimensional configurations. By way of non-limiting examples, naked polynucleotides can be single-stranded molecules, double stranded molecules, circular molecules (e.g., plasmids and artificial chromosomes), molecules that contain portions that are single stranded and portions that are double stranded (e.g., ribozymes), and the like. In some embodiments, the naked polynucleotide contains only the CRISPR-Cas system polynucleotide(s) of the present invention. In some embodiments, the naked polynucleotide can contain other nucleic acids and/or polynucleotides in addition to the CRISPR-Cas system polynucleotide(s) of the present invention. The naked polynucleotides can include one or more elements of a transposon system. Transposons and system thereof are described in greater detail elsewhere herein.

### Non-Viral Polynucleotide Vectors

[0517] In some embodiments, one or more of the CRISPR-Cas system polynucleotides can be included in a non-viral polynucleotide vector. Suitable non-viral polynucleotide vectors include, but are not limited to, transposon vectors and vector systems, plasmids, bacterial artificial chromosomes, yeast artificial chromosomes, AR (antibiotic resistance)-free plasmids and miniplasmids, circular covalently closed vectors (e.g. minicircles, minivectors, miniknots), linear covalently closed vectors (“dumbbell shaped”), MIDGE (minimalistic immunologically defined gene expression) vectors, MiLV (micro-linear vector) vectors, Ministrings, mini-intronic plasmids, PSK systems (post-segregationally killing systems), ORT (operator repressor titration) plasmids, and the like. See e.g., Hardee et al. 2017. Genes. 8(2):65.

[0518] In some embodiments, the non-viral polynucleotide vector can have a conditional origin of replication. In some embodiments, the non-viral polynucleotide vector can be an ORT plasmid. In some embodiments, the non-viral polynucleotide vector can have a minimalistic immunologically defined gene expression. In some embodiments, the non-viral polynucleotide vector can have one or more post-segregationally killing system genes. In some embodiments, the non-viral polynucleotide vector is AR-free. In some embodiments, the non-viral polynucleotide vector is a minivector. In some embodiments, the non-viral polynucleotide vector includes a nuclear localization signal. In some embodiments, the non-viral polynucleotide vector can include one or more CpG motifs. In some embodiments, the non-viral polynucleotide vectors can include one or more scaffold/matrix attachment regions (S/MARs). See e.g., Mirkovitch et al. 1984. Cell. 39:223-232, Wong et al. 2015. Adv. Genet. 89:113-152, whose techniques and vectors can be adapted for use in the present invention. S/MARs are AT-rich sequences that play a role in the spatial organization of chromosomes through DNA loop base attachment to the nuclear matrix. S/MARs are often found close to regulatory elements such as promoters, enhancers, and origins of DNA replication. Inclusion of one or S/MARs can facilitate a once-per-cell-cycle replication to maintain the non-viral polynucleotide vector as an episome in daughter cells. In certain embodiments, the S/MAR sequence is located downstream of an actively transcribed polynucleotide (e.g., one or more CRISPR-Cas system polynucleotides of the present invention) included in the non-viral polynucleotide vector. In some embodiments, the S/MAR can be a S/MAR from the beta-interferon gene cluster. See e.g., Verghese et al. 2014. Nucleic Acid Res. 42:e53; Xu et al. 2016. Sci. China Life Sci. 59:1024-1033; Jin et al. 2016. 8:702-711; Koirala et al. 2014. Adv. Exp. Med. Biol. 801:703-709; and Nehlsen et al. 2006. Gene Ther. Mol. Biol. 10:233-244, whose techniques and vectors can be adapted for use in the present invention.

[0519] In some embodiments, the non-viral vector is a transposon vector or system thereof. As used herein, “transposon” (also referred to as transposable element) refers to a polynucleotide sequence that is capable of moving form location in a genome to another. There are several classes of transposons. Transposons include retrotransposons and DNA transposons. Retrotransposons require the transcription of the polynucleotide that is moved (or transposed) in order to transpose the polynucleotide to a new genome or polynucleotide. DNA transposons are those that do not require reverse transcription of the polynucleotide that is moved (or transposed) in order to transpose the polynucleotide to a new genome or polynucleotide. In some embodiments, the non-viral polynucleotide vector can be a retrotransposon vector. In some embodiments, the retrotransposon vector includes long terminal repeats. In some embodiments, the retrotransposon vector does not include long terminal repeats. In some embodiments, the non-viral polynucleotide vector can be a DNA transposon vector. DNA transposon vectors can include a polynucleotide sequence encoding a transposase. In some embodiments, the transposon vector is configured as a non-autonomous transposon vector, meaning that the transposition does not occur spontaneously on its own. In some of these embodiments, the transposon vector lacks one or more polynucleotide sequences encoding proteins required for transposition. In some embodiments, the non-autonomous transposon vectors lack one or more Ac elements.

[0520] In some embodiments a non-viral polynucleotide transposon vector system can include a first polynucleotide vector that contains the CRISPR-Cas system polynucleotide(s) of the present invention flanked on the 5′ and 3′ ends by transposon terminal inverted repeats (TIRs) and a second polynucleotide vector that includes a polynucleotide capable of encoding a transposase coupled to a promoter to drive expression of the transposase. When both are expressed in the same cell the transposase can be expressed from the second vector and can transpose the material between the TIRs on the first vector (e.g., the CRISPR-Cas system polynucleotide(s) of the present invention) and integrate it into one or more positions in the host cell's genome. In some embodiments the transposon vector or system thereof can be configured as a gene trap. In some embodiments, the TIRs can be configured to flank a strong splice acceptor site followed by a reporter and/or other gene (e.g., one or more of the CRISPR-Cas system polynucleotide(s) of the present invention) and a strong poly A tail. When transposition occurs while using this vector or system thereof, the transposon can insert into an intron of a gene and the inserted reporter or other gene can provoke a mis-splicing process and as a result it in activates the trapped gene.

[0521] Any suitable transposon system can be used. Suitable transposon and systems thereof can include, but are not limited to, Sleeping Beauty transposon system (Tcl/mariner superfamily) (see e.g., Ivics et al. 1997. Cell. 91(4): 501-510), piggyBac (piggyBac superfamily) (see e.g., Li et al. 2013 110(25): E2279-E2287 and Yusa et al. 2011. PNAS. 108(4): 1531-1536), Tol2 (superfamily hAT), Frog Prince (Tcl/mariner superfamily) (see e.g., Miskey et al. 2003 Nucleic Acid Res. 31(23):6873-6881) and variants thereof.

### Non-Vector Delivery Vehicles

[0522] The delivery vehicles may comprise non-viral vehicles. In general, methods and vehicles capable of delivering nucleic acids and/or proteins may be used for delivering the systems compositions herein. Examples of non-viral vehicles include lipid nanoparticles, cell-penetrating peptides (CPPs), DNA nanoclews, metal nanoparticles, streptolysin O, multifunctional envelope-type nanodevices (MENDs), lipid-coated mesoporous silica particles, and other inorganic nanoparticles.

### Lipid Particles

[0523] The delivery vehicles may comprise lipid particles, e.g., lipid nanoparticles (LNPs) and liposomes. Lipofection is described in e.g., U.S. Pat. Nos. 5,049,386, 4,946,787; and 4,897,355) and lipofection reagents are sold commercially (e.g., Transfectam™ and Lipofectin™). Cationic and neutral lipids that are suitable for efficient receptor-recognition lipofection of polynucleotides include those of Felgner, International Patent Publication Nos. WO 91/17424 and WO 91/16024. The preparation of lipid:nucleic acid complexes, including targeted liposomes such as immunolipid complexes, is well known to one of skill in the art (see, e.g., Crystal, Science 270:404-410 (1995); Blaese et al., Cancer Gene Ther. 2:291-297 (1995); Behr et al., Bioconjugate Chem. 5:382-389 (1994); Remy et al., Bioconjugate Chem. 5:647-654 (1994); Gao et al., Gene Therapy 2:710-722 (1995); Ahmad et al., Cancer Res. 52:4817-4820 (1992); U.S. Pat. Nos. 4,186,183, 4,217,344, 4,235,871, 4,261,975, 4,485,054, 4,501,728, 4,774,085, 4,837,028, and 4,946,787).

### Lipid Nanoparticles (LNPs)

[0524] LNPs may encapsulate nucleic acids within cationic lipid particles (e.g., liposomes), and may be delivered to cells with relative ease. In some examples, lipid nanoparticles do not contain any viral components, which helps minimize safety and immunogenicity concerns. Lipid particles may be used for in vitro, ex vivo, and in vivo deliveries. Lipid particles may be used for various scales of cell populations.

[0525] In some examples. LNPs may be used for delivering DNA molecules (e.g., those comprising coding sequences of Cas and/or gRNA) and/or RNA molecules (e.g., mRNA of Cas, gRNAs). In certain cases, LNPs may be use for delivering RNP complexes of Cas/gRNA.

[0526] Components in LNPs may comprise cationic lipids 1,2-dilineoyl-3-dimethylammonium-propane (DLinDAP), 1,2-dilinoleyloxy-3-N,N-dimethylaminopropane (DLinDMA), 1,2-dilinoleyloxyketo-N,N-dimethyl-3-aminopropane (DLinK-DMA), 1,2-dilinoleyl-4-(2-dimethylaminoethyl)-[1,3]-dioxolane (DLinKC2-DMA), (3-o-[2″-(methoxypolyethyleneglycol 2000) succinoyl]-1,2-dimyristoyl-sn-glycol (PEG-S-DMG), R-3-[(ro-methoxy-poly(ethylene glycol)2000) carbamoyl]-1,2-dimyristyloxlpropyl-3-amine (PEG-C-DOMG, and any combination thereof. Preparation of LNPs and encapsulation may be adapted from Rosin et al, Molecular Therapy, vol. 19, no. 12, pages 1286-2200, December 2011).

[0527] In some embodiments, an LNP delivery vehicle can be used to deliver a virus particle containing a CRISPR-Cas system and/or component(s) thereof. In some embodiments, the virus particle(s) can be adsorbed to the lipid particle, such as through electrostatic interactions, and/or can be attached to the liposomes via a linker.

[0528] In some embodiments, the LNP contains a nucleic acid, wherein the charge ratio of nucleic acid backbone phosphates to cationic lipid nitrogen atoms is about 1: 1.5-7 or about 1:4.

[0529] In some embodiments, the LNP also includes a shielding compound, which is removable from the lipid composition under in vivo conditions. In some embodiments, the shielding compound is a biologically inert compound. In some embodiments, the shielding compound does not carry any charge on its surface or on the molecule as such. In some embodiments, the shielding compounds are polyethylenglycoles (PEGs), hydroxyethylglucose (HEG) based polymers, polyhydroxyethyl starch (polyHES) and polypropylene. In some embodiments, the PEG, HEG, polyHES, and a polypropylene weight between about 500 to 10,000 Da or between about 2000 to 5000 Da. In some embodiments, the shielding compound is PEG2000 or PEG5000.

[0530] In some embodiments, the LNP can include one or more helper lipids. In some embodiments, the helper lipid can be a phosphor lipid or a steroid. In some embodiments, the helper lipid is between about 20 mol % to 80 mol % of the total lipid content of the composition. In some embodiments, the helper lipid component is between about 35 mol % to 65 mol % of the total lipid content of the LNP. In some embodiments, the LNP includes lipids at 50 mol % and the helper lipid at 50 mol % of the total lipid content of the LNP.

[0531] Other non-limiting, exemplary LNP delivery vehicles are described in U.S. Patent Publication Nos. US 20160174546, US 20140301951, US 20150105538, US 20150250725, Wang et al., J. Control Release, 2017 Jan. 31. pii: S0168-3659(17)30038-X. doi: 10.1016/j.jconrel.2017.01.037. [Epub ahead of print]; Altmoglu et al., Biomater Sci., 4(12):1773-80, Nov. 15, 2016; Wang et al., PNAS, 113(11):2868-73 Mar. 15, 2016; Wang et al., PloS One, 10(11): e0141860. doi: 10.1371/journal.pone.0141860. eCollection 2015, Nov. 3, 2015; Takeda et al., Neural Regen Res. 10(5):689-90, May 2015; Wang et al., Adv. Healthcare Mater., 3(9):1398-403, September 2014; and Wang et al., Agnew Chem Int Ed Engl., 53(11):2893-8, Mar. 10, 2014; James E. Dahlman and Carmen Barnes et al. Nature Nanotechnology (2014) published online 11 May 2014, doi:10.1038/nnano.2014.84; Coelho et al., N Engl J Med 2013; 369:819-29; Aleku et al., Cancer Res., 68(23): 9788-98 (Dec. 1, 2008), Strumberg et al., Int. J. Clin. Pharmacol. Ther., 50(1): 76-8 (January 2012), Schultheis et al., J. Clin. Oncol., 32(36): 4141-48 (Dec. 20, 2014), and Fehring et al., Mol. Ther., 22(4): 811-20 (Apr. 22, 2014); Novobrantseva, Molecular Therapy-Nucleic Acids (2012) 1, e4; doi:10.1038/mtna.2011.3; WO2012135025; US 20140348900; US 20140328759; US 20140308304; WO 2005/105152; WO 2006/069782; WO 2007/121947; US 2015/082080; US 20120251618; 7,982,027; 7,799,565; 8,058,069; 8,283,333; 7,901,708; 7,745,651; 7,803,397; 8,101,741; 8,188,263; 7,915,399; 8,236,943 and 7,838,658 and European Pat. Nos 1766035; 1519714; 1781593 and 1664316.

### Liposomes

[0532] In some embodiments, a lipid particle may be liposome. Liposomes are spherical vesicle structures composed of a uni- or multilamellar lipid bilayer surrounding internal aqueous compartments and a relatively impermeable outer lipophilic phospholipid bilayer. In some embodiments, liposomes are biocompatible, nontoxic, can deliver both hydrophilic and lipophilic drug molecules, protect their cargo from degradation by plasma enzymes, and transport their load across biological membranes and the blood brain barrier (BBB).

[0533] Liposomes can be made from several different types of lipids, e.g., phospholipids. A liposome may comprise natural phospholipids and lipids such as 1,2-distearoryl-sn-glycero-3-phosphatidyl choline (DSPC), sphingomyelin, egg phosphatidylcholines, monosialoganglioside, or any combination thereof.

[0534] Several other additives may be added to liposomes in order to modify their structure and properties. For instance, liposomes may further comprise cholesterol, sphingomyelin, and/or 1,2-dioleoyl-sn-glycero-3-phosphoethanolamine (DOPE), e.g., to increase stability and/or to prevent the leakage of the liposomal inner cargo.

[0535] In some embodiments, a liposome delivery vehicle can be used to deliver a virus particle containing a CRISPR-Cas system and/or component(s) thereof. In some embodiments, the virus particle(s) can be adsorbed to the liposome, such as through electrostatic interactions, and/or can be attached to the liposomes via a linker.

[0536] In some embodiments, the liposome can be a Trojan Horse liposome (also known in the art as Molecular Trojan Horses), see e.g. http://cshprotocols.cshlp.org/content/2010/4/pdb.prot5407.long, the teachings of which can be applied and/or adapted to generated and/or deliver the CRISPR-Cas systems described herein.

[0537] Other non-limiting, exemplary liposomes can be those as set forth in Wang et al., ACS Synthetic Biology, 1, 403-07 (2012); Wang et al., PNAS, 113(11) 2868-2873 (2016); Spuch and Navarro, Journal of Drug Delivery, vol. 2011, Article ID 469679, 12 pages, 2011. doi:10.1155/2011/469679; WO 2008/042973; U.S. Pat. No. 8,071,082; WO 2014/186366; 20160257951; US20160129120; US 20160244761; 20120251618; WO2013/093648; Lipofectin (a combination of DOTMA and DOPE), Lipofectase, LIPOFECTAMINE® (e.g., LIPOFECTAMINE® 2000, LIPOFECTAMINE® 3000, LIPOFECTAMINE® RNAiMAX, LIPOFECTAMINE® LTX), SAINT-RED (Synvolux Therapeutics, Groningen Netherlands), DOPE, Cytofectin (Gilead Sciences, Foster City, Calif.), and Eufectins (JBL, San Luis Obispo, Calif.).

### Stable Nucleic-Acid-Lipid Particles (SNALPs)

[0538] In some embodiments, the lipid particles may be stable nucleic acid lipid particles (SNALPs). SNALPs may comprise an ionizable lipid (DLinDMA) (e.g., cationic at low pH), a neutral helper lipid, cholesterol, a diffusible polyethylene glycol (PEG)-lipid, or any combination thereof. In some examples, SNALPs may comprise synthetic cholesterol, dipalmitoylphosphatidylcholine, 3-N-[(w-methoxy polyethylene glycol)2000)carbamoyl]-1,2-dimyrestyloxypropylamine, and cationic 1,2-dilinoleyloxy-3-N,Ndimethylaminopropane. In some examples, SNALPs may comprise synthetic cholesterol, 1,2-distearoyl-sn-glycero-3-phosphocholine, PEG-cDMA, and 1,2-dilinoleyloxy-3-(N;N-dimethyl)aminopropane (DLinDMAo).

[0539] Other non-limiting, exemplary SNALPs that can be used to deliver the CRISPR-Cas systems described herein can be any such SNALPs as described in Morrissey et al., Nature Biotechnology, Vol. 23, No. 8, August 2005, Zimmerman et al., Nature Letters, Vol. 441, 4 May 2006; Geisbert et al., Lancet 2010; 375: 1896-905; Judge, J. Clin. Invest. 119:661-673 (2009); and Semple et al., Nature Niotechnology, Volume 28 Number 2 Feb. 2010, pp. 172-177.

### Other Lipids

[0540] The lipid particles may also comprise one or more other types of lipids, e.g., cationic lipids, such as amino lipid 2,2-dilinoleyl-4-dimethylaminoethyl-[1,3]-dioxolane (DLin-KC2-DMA), DLin-KC2-DMA4, C12-200 and colipids disteroylphosphatidyl choline, cholesterol, and PEG-DMG.

[0541] In some embodiments, the delivery vehicle can be or include a lipidoid, such as any of those set forth in, for example, US 20110293703.

[0542] In some embodiments, the delivery vehicle can be or include an amino lipid, such as any of those set forth in, for example, Jayaraman, Angew. Chem. Int. Ed. 2012, 51, 8529-8533.

[0543] In some embodiments, the delivery vehicle can be or include a lipid envelope, such as any of those set forth in, for example, Korman et al., 2011. Nat. Biotech. 29:154-157.

### Lipoplexes Polyplexes

[0544] In some embodiments, the delivery vehicles comprise lipoplexes and/or polyplexes. Lipoplexes may bind to negatively charged cell membrane and induce endocytosis into the cells. Examples of lipoplexes may be complexes comprising lipid(s) and non-lipid components. Examples of lipoplexes and polyplexes include FuGENE-6 reagent, a non-liposomal solution containing lipids and other components, zwitterionic amino lipids (ZALs), Ca2b (e.g., forming DNA/Ca²¹ microcomplexes), polyethenimine (PEI) (e.g., branched PEI), and poly(L-lysine) (PLL).

### Sugar-Based Particles

[0545] In some embodiments, the delivery vehicle can be a sugar-based particle. In some embodiments, the sugar-based particles can be or include GalNAc, such as any of those described in WO2014118272; US 20020150626; Nair, J K et al., 2014, Journal of the American Chemical Society 136 (49), 16958-16961; Ostergaard et al., Bioconjugate Chem., 2015, 26 (8), pp 1451-1455.

### Cell Penetrating Peptides

[0546] In some embodiments, the delivery vehicles comprise cell penetrating peptides (CPPs). CPPs are short peptides that facilitate cellular uptake of various molecular cargo (e.g., from nanosized particles to small chemical molecules and large fragments of DNA).

[0547] CPPs may be of different sizes, amino acid sequences, and charges. In some examples, CPPs can translocate the plasma membrane and facilitate the delivery of various molecular cargoes to the cytoplasm or an organelle. CPPs may be introduced into cells via different mechanisms, e.g., direct penetration in the membrane, endocytosis-mediated entry, and translocation through the formation of a transitory structure.

[0548] CPPs may have an amino acid composition that either contains a high relative abundance of positively charged amino acids such as lysine or arginine or has sequences that contain an alternating pattern of polar/charged amino acids and non-polar, hydrophobic amino acids. These two types of structures are referred to as polycationic or amphipathic, respectively. A third class of CPPs are the hydrophobic peptides, containing only apolar residues, with low net charge or have hydrophobic amino acid groups that are crucial for cellular uptake. Another type of CPPs is the trans-activating transcriptional activator (Tat) from Human Immunodeficiency Virus 1 (HIV-1). Examples of CPPs include to Penetratin, Tat (48-60), Transportan, and (R-AhX-R4) (Ahx refers to aminohexanoyl), Kaposi fibroblast growth factor (FGF) signal peptide sequence, integrin β3 signal peptide sequence, polyarginine peptide Args sequence, Guanine rich-molecular transporters, and sweet arrow peptide. Examples of CPPs and related applications also include those described in U.S. Pat. No. 8,372,951.

[0549] CPPs can be used for in vitro and ex vivo work quite readily, and extensive optimization for each cargo and cell type is usually required. In some examples, CPPs may be covalently attached to the Cas protein directly, which is then complexed with the gRNA and delivered to cells. In some examples, separate delivery of CPP-Cas and CPP-gRNA to multiple cells may be performed. CPP may also be used to delivery RNPs.

[0550] CPPs may be used to deliver the compositions and systems to plants. In some examples, CPPs may be used to deliver the components to plant protoplasts, which are then regenerated to plant cells and further to plants.

### DNA Nanoclews

[0551] In some embodiments, the delivery vehicles comprise DNA nanoclews. A DNA nanoclew refers to a sphere-like structure of DNA (e.g., with a shape of a ball of yarn). The nanoclew may be synthesized by rolling circle amplification with palindromic sequences that aide in the self-assembly of the structure. The sphere may then be loaded with a payload. An example of DNA nanoclew is described in Sun W et al, J Am Chem Soc. 2014 Oct. 22; 136(42):14722-5; and Sun W et al, Angew Chem Int Ed Engl. 2015 Oct. 5; 54(41):12029-33. DNA nanoclew may have a palindromic sequences to be partially complementary to the gRNA within the Cas:gRNA ribonucleoprotein complex. A DNA nanoclew may be coated, e.g., coated with PEI to induce endosomal escape.

### Metal Nanoparticles

[0552] In some embodiments, the delivery vehicles comprise gold nanoparticles (also referred to AuNPs or colloidal gold). Gold nanoparticles may form complex with cargos, e.g., Cas:gRNA RNP. Gold nanoparticles may be coated, e.g., coated in a silicate and an endosomal disruptive polymer, PAsp(DET). Examples of gold nanoparticles include AuraSense Therapeutics' Spherical Nucleic Acid (SNA™) constructs, and those described in Mout R, et al. (2017). ACS Nano 11:2452-8; Lee K, et al. (2017). Nat Biomed Eng 1:889-901. Other metal nanoparticles can also be complexed with cargo(s). Such metal particles include, tungsten, palladium, rhodium, platinum, and iridium particles. Other non-limiting, exemplary metal nanoparticles are described in US 20100129793.

iTOP

[0553] In some embodiments, the delivery vehicles comprise iTOP. iTOP refers to a combination of small molecules drives the highly efficient intracellular delivery of native proteins, independent of any transduction peptide. iTOP may be used for induced transduction by osmocytosis and propanebetaine, using NaCl-mediated hyperosmolality together with a transduction compound (propanebetaine) to trigger macropinocytotic uptake into cells of extracellular macromolecules. Examples of iTOP methods and reagents include those described in D'Astolfo D S, Pagliero R J, Pras A, et al. (2015). Cell 161:674-690.

### Polymer-Based Particles

[0554] In some embodiments, the delivery vehicles may comprise polymer-based particles (e.g., nanoparticles). In some embodiments, the polymer-based particles may mimic a viral mechanism of membrane fusion. The polymer-based particles may be a synthetic copy of Influenza virus machinery and form transfection complexes with various types of nucleic acids ((siRNA, miRNA, plasmid DNA or shRNA, mRNA) that cells take up via the endocytosis pathway, a process that involves the formation of an acidic compartment. The low pH in late endosomes acts as a chemical switch that renders the particle surface hydrophobic and facilitates membrane crossing. Once in the cytosol, the particle releases its payload for cellular action. This Active Endosome Escape technology is safe and maximizes transfection efficiency as it is using a natural uptake pathway. In some embodiments, the polymer-based particles may comprise alkylated and carboxyalkylated branched polyethylenimine. In some examples, the polymer-based particles are VIROMER, e.g., VIROMER RNAi, VIROMER RED, VIROMER mRNA, VIROMER CRISPR. Example methods of delivering the systems and compositions herein include those described in Bawage S S et al., Synthetic mRNA expressed Cas13a mitigates RNA virus infections, www.biorxiv.org/content/10.1101/370460v1.full doi: doi.org/10.1101/370460, Viromer® RED, a powerful tool for transfection of keratinocytes. doi: 10.13140/RG.2.2.16993.61281, Viromer® Transfection—Factbook 2018: technology, product overview, users' data, doi:10.13140/RG.2.2.23912.16642. Other exemplary and non-limiting polymeric particles are described in US 20170079916, US 20160367686, US 20110212179, US 20130302401, 6,007,845, 5,855,913, 5,985,309, 5,543,158, WO2012135025, US 20130252281, US 20130245107, US 20130244279; US 20050019923, and 20080267903.

### Streptolysin O (SLO)

[0555] The delivery vehicles may be streptolysin O (SLO). SLO is a toxin produced by Group A streptococci that works by creating pores in mammalian cell membranes. SLO may act in a reversible manner, which allows for the delivery of proteins (e.g., up to 100 kDa) to the cytosol of cells without compromising overall viability. Examples of SLO include those described in Sierig G, et al. (2003). Infect Immun 71:446-55; Walev I, et al. (2001). Proc Natl Acad Sci USA 98:3185-90; Teng K W, et al. (2017). Elife 6:e25460.

### Multifunctional Envelope-Type Nanodevice (MEND)

[0556] The delivery vehicles may comprise multifunctional envelope-type nanodevice (MENDs). MENDs may comprise condensed plasmid DNA, a PLL core, and a lipid film shell. A MEND may further comprise cell-penetrating peptide (e.g., stearyl octaarginine). The cell penetrating peptide may be in the lipid shell. The lipid envelope may be modified with one or more functional components, e.g., one or more of: polyethylene glycol (e.g., to increase vascular circulation time), ligands for targeting of specific tissues/cells, additional cell-penetrating peptides (e.g., for greater cellular delivery), lipids to enhance endosomal escape, and nuclear delivery tags. In some examples, the MEND may be a tetra-lamellar MEND (T-MEND), which may target the cellular nucleus and mitochondria. In certain examples, a MEND may be a PEG-peptide-DOPE-conjugated MEND (PPD-MEND), which may target bladder cancer cells. Examples of MENDs include those described in Kogure K, et al. (2004). J Control Release 98:317-23; Nakamura T, et al. (2012). Acc Chem Res 45:1113-21.

### Lipid-Coated Mesoporous Silica Particles

[0557] The delivery vehicles may comprise lipid-coated mesoporous silica particles. Lipid-coated mesoporous silica particles may comprise a mesoporous silica nanoparticle core and a lipid membrane shell. The silica core may have a large internal surface area, leading to high cargo loading capacities. In some embodiments, pore sizes, pore chemistry, and overall particle sizes may be modified for loading different types of cargos. The lipid coating of the particle may also be modified to maximize cargo loading, increase circulation times, and provide precise targeting and cargo release. Examples of lipid-coated mesoporous silica particles include those described in Du X, et al. (2014). Biomaterials 35:5580-90; Durfee P N, et al. (2016). ACS Nano 10:8325-45.

### Inorganic Nanoparticles

[0558] The delivery vehicles may comprise inorganic nanoparticles. Examples of inorganic nanoparticles include carbon nanotubes (CNTs) (e.g., as described in Bates K and Kostarelos K. (2013). Adv Drug Deliv Rev 65:2023-33), bare mesoporous silica nanoparticles (MSNPs) (e.g., as described in Luo G F, et al. (2014). Sci Rep 4:6064), and dense silica nanoparticles (SiNPs) (as described in Luo D and Saltzman W M. (2000). Nat Biotechnol 18:893-5).

### Exosomes

[0559] The delivery vehicles may comprise exosomes. Exosomes include membrane bound extracellular vesicles, which can be used to contain and delivery various types of biomolecules, such as proteins, carbohydrates, lipids, and nucleic acids, and complexes thereof (e.g., RNPs). Examples of exosomes include those described in Schroeder A, et al., J Intern Med. 2010 January; 267(1):9-21; El-Andaloussi S, et al., Nat Protoc. 2012 December; 7(12):2112-26; Uno Y, et al., Hum Gene Ther. 2011 June; 22(6):711-9; Zou W, et al., Hum Gene Ther. 2011 April; 22(4):465-75.

[0560] In some examples, the exosome may form a complex (e.g., by binding directly or indirectly) to one or more components of the cargo. In certain examples, a molecule of an exosome may be fused with first adapter protein and a component of the cargo may be fused with a second adapter protein. The first and the second adapter protein may specifically bind each other, thus associating the cargo with the exosome. Examples of such exosomes include those described in Ye Y, et al., Biomater Sci. 2020 Apr. 28. doi: 10.1039/d0bm00427h.

[0561] Other non-limiting, exemplary exosomes include any of those set forth in Alvarez-Erviti et al. 2011, Nat Biotechnol 29: 341; [1401] El-Andaloussi et al. (Nature Protocols 7:2112-2126(2012); and Wahlgren et al. (Nucleic Acids Research, 2012, Vol. 40, No. 17 e130).

### Spherical Nucleic Acids (SNAs)

[0562] In some embodiments, the delivery vehicle can be a SNA. SNAs are three dimensional nanostructures that can be composed of densely functionalized and highly oriented nucleic acids that can be covalently attached to the surface of spherical nanoparticle cores. The core of the spherical nucleic acid can impart the conjugate with specific chemical and physical properties, and it can act as a scaffold for assembling and orienting the oligonucleotides into a dense spherical arrangement that gives rise to many of their functional properties, distinguishing them from all other forms of matter. In some embodiments, the core is a crosslinked polymer. Non-limiting, exemplary SNAs can be any of those set forth in Cutler et al., J. Am. Chem. Soc. 2011 133:9254-9257, Hao et al., Small. 2011 7:3158-3162, Zhang et al., ACS Nano. 2011 5:6962-6970, Cutler et al., J. Am. Chem. Soc. 2012 134:1376-1391, Young et al., Nano Lett. 2012 12:3867-71, Zheng et al., Proc. Natl. Acad. Sci. USA. 2012 109:11975-80, Mirkin, Nanomedicine 2012 7:635-638 Zhang et al., J. Am. Chem. Soc. 2012 134:16488-1691, Weintraub, Nature 2013 495:S14-S16, Choi et al., Proc. Natl. Acad. Sci. USA. 2013 110(19):7625-7630, Jensen et al., Sci. Transl. Med. 5, 209ra152 (2013) and Mirkin, et al., and Small, 10:186-192.

### Self-Assembling Nanoparticles

[0563] In some embodiments, the delivery vehicle is a self-assembling nanoparticle. The self-assembling nanoparticles can contain one or more polymers. The self-assembling nanoparticles can be PEGylated. Self-assembling nanoparticles are known in the art. Non-limiting, exemplary self-assembling nanoparticles can any as set forth in Schiffelers et al., Nucleic Acids Research, 2004, Vol. 32, No. 19, Bartlett et al. (PNAS, Sep. 25, 2007, vol. 104, no. 39; Davis et al., Nature, Vol 464, 15 Apr. 2010.

### Supercharged Proteins

[0564] In some embodiments, the delivery vehicle can be a supercharged protein. As used herein “Supercharged proteins” are a class of engineered or naturally occurring proteins with unusually high positive or negative net theoretical charge. Non-limiting, exemplary supercharged proteins can be any of those set forth in Lawrence et al., 2007, Journal of the American Chemical Society 129, 10110-10112.

### Targeted Delivery

[0565] In some embodiments, the delivery vehicle can allow for targeted delivery to a specific cell, tissue, organ, or system. In such embodiments, the delivery vehicle can include one or more targeting moieties that can direct targeted delivery of the cargo(s). In an embodiment, the delivery vehicle comprises a targeting moiety, such as active targeting of a lipid entity of the invention, e.g., lipid particle or nanoparticle or liposome or lipid bilayer of the invention comprising a targeting moiety for active targeting.

[0566] With regard to targeting moieties, mention is made of Deshpande et al, “Current trends in the use of liposomes for tumor targeting,” Nanomedicine (Lond). 8(9), doi:10.2217/nnm.13.118 (2013), and the documents it cites, all of which are incorporated herein by reference and the teachings of which can be applied and/or adapted for targeted delivery of one or more CRISPR-Cas molecules described herein. Mention is also made of International Patent Publication No. WO 2016/027264, and the documents it cites, all of which are incorporated herein by reference, the teachings of which can be applied and/or adapted for targeted delivery of one or more CRISPR-Cas molecules described herein. And mention is made of Lorenzer et al, “Going beyond the liver: Progress and challenges of targeted delivery of siRNA therapeutics,” Journal of Controlled Release, 203: 1-15 (2015), and the documents it cites, all of which are incorporated herein by reference, the teachings of which can be applied and/or adapted for targeted delivery of one or more CRISPR-Cas molecules described herein.

[0567] An actively targeting lipid particle or nanoparticle or liposome or lipid bilayer delivery system (generally as to embodiments of the invention, “lipid entity of the invention” delivery systems) are prepared by conjugating targeting moieties, including small molecule ligands, peptides and monoclonal antibodies, on the lipid or liposomal surface; for example, certain receptors, such as folate and transferrin (Tf) receptors (TfR), are overexpressed on many cancer cells and have been used to make liposomes tumor cell specific. Liposomes that accumulate in the tumor microenvironment can be subsequently endocytosed into the cells by interacting with specific cell surface receptors. To efficiently target liposomes to cells, such as cancer cells, it is useful that the targeting moiety have an affinity for a cell surface receptor and to link the targeting moiety in sufficient quantities to have optimum affinity for the cell surface receptors; and determining these embodiments are within the ambit of the skilled artisan. In the field of active targeting, there are a number of cell-, e.g., tumor-, specific targeting ligands.

[0568] Also, as to active targeting, with regard to targeting cell surface receptors such as cancer cell surface receptors, targeting ligands on liposomes can provide attachment of liposomes to cells, e.g., vascular cells, via a noninternalizing epitope; and, this can increase the extracellular concentration of that which is being delivered, thereby increasing the amount delivered to the target cells. A strategy to target cell surface receptors, such as cell surface receptors on cancer cells, such as overexpressed cell surface receptors on cancer cells, is to use receptor-specific ligands or antibodies. Many cancer cell types display upregulation of tumor-specific receptors. For example, TfRs and folate receptors (FRs) are greatly overexpressed by many tumor cell types in response to their increased metabolic demand. Folic acid can be used as a targeting ligand for specialized delivery owing to its ease of conjugation to nanocarriers, its high affinity for FRs and the relatively low frequency of FRs, in normal tissues as compared with their overexpression in activated macrophages and cancer cells, e.g., certain ovarian, breast, lung, colon, kidney and brain tumors. Overexpression of FR on macrophages is an indication of inflammatory diseases, such as psoriasis, Crohn's disease, rheumatoid arthritis and atherosclerosis; accordingly, folate-mediated targeting of the invention can also be used for studying, addressing or treating inflammatory disorders, as well as cancers. Folate-linked lipid particles or nanoparticles or liposomes or lipid bilayers of the invention (“lipid entity of the invention”) deliver their cargo intracellularly through receptor-mediated endocytosis. Intracellular trafficking can be directed to acidic compartments that facilitate cargo release, and, most importantly, release of the cargo can be altered or delayed until it reaches the cytoplasm or vicinity of target organelles. Delivery of cargo using a lipid entity of the invention having a targeting moiety, such as a folate-linked lipid entity of the invention, can be superior to nontargeted lipid entity of the invention. The attachment of folate directly to the lipid head groups may not be favorable for intracellular delivery of folate-conjugated lipid entity of the invention, since they may not bind as efficiently to cells as folate attached to the lipid entity of the invention surface by a spacer, which may can enter cancer cells more efficiently. A lipid entity of the invention coupled to folate can be used for the delivery of complexes of lipid, e.g., liposome, e.g., anionic liposome and virus or capsid or envelope or virus outer protein, such as those herein discussed such as adenovirus or AAV. Tf is a monomeric serum glycoprotein of approximately 80 KDa involved in the transport of iron throughout the body. Tf binds to the TfR and translocates into cells via receptor-mediated endocytosis. The expression of TfR is can be higher in certain cells, such as tumor cells (as compared with normal cells and is associated with the increased iron demand in rapidly proliferating cancer cells. Accordingly, the invention comprehends a TfR-targeted lipid entity of the invention, e.g., as to liver cells, liver cancer, breast cells such as breast cancer cells, colon such as colon cancer cells, ovarian cells such as ovarian cancer cells, head, neck and lung cells, such as head, neck and non-small-cell lung cancer cells, cells of the mouth such as oral tumor cells.

[0569] Also, as to active targeting, a lipid entity of the invention can be multifunctional, i.e., employ more than one targeting moiety such as CPP, along with Tf; a bifunctional system; e.g., a combination of Tf and poly-L-arginine which can provide transport across the endothelium of the blood-brain barrier. EGFR, is a tyrosine kinase receptor belonging to the ErbB family of receptors that mediates cell growth, differentiation and repair in cells, especially non-cancerous cells, but EGF is overexpressed in certain cells such as many solid tumors, including colorectal, non-small-cell lung cancer, squamous cell carcinoma of the ovary, kidney, head, pancreas, neck and prostate, and especially breast cancer. The invention comprehends EGFR-targeted monoclonal antibody(ies) linked to a lipid entity of the invention. HER-2 is often overexpressed in patients with breast cancer, and is also associated with lung, bladder, prostate, brain and stomach cancers. HER-2, encoded by the ERBB2 gene. The invention comprehends a HER-2-targeting lipid entity of the invention, e.g., an anti-HER-2-antibody (or binding fragment thereof)-lipid entity of the invention, a HER-2-targeting-PEGylated lipid entity of the invention (e.g., having an anti-HER-2-antibody or binding fragment thereof), a HER-2-targeting-maleimide-PEG polymer-lipid entity of the invention (e.g., having an anti-HER-2-antibody or binding fragment thereof). Upon cellular association, the receptor-antibody complex can be internalized by formation of an endosome for delivery to the cytoplasm.

[0570] With respect to receptor-mediated targeting, the skilled artisan takes into consideration ligand/target affinity and the quantity of receptors on the cell surface, and that PEGylation can act as a barrier against interaction with receptors. The use of antibody-lipid entity of the invention targeting can be advantageous. Multivalent presentation of targeting moieties can also increase the uptake and signaling properties of antibody fragments. In practice of the invention, the skilled person takes into account ligand density (e.g., high ligand densities on a lipid entity of the invention may be advantageous for increased binding to target cells). Preventing early by macrophages can be addressed with a sterically stabilized lipid entity of the invention and linking ligands to the terminus of molecules such as PEG, which is anchored in the lipid entity of the invention (e.g., lipid particle or nanoparticle or liposome or lipid bilayer). The microenvironment of a cell mass such as a tumor microenvironment can be targeted; for instance, it may be advantageous to target cell mass vasculature, such as the tumor vasculature microenvironment. Thus, the invention comprehends targeting VEGF. VEGF and its receptors are well-known proangiogenic molecules and are well-characterized targets for antiangiogenic therapy. Many small-molecule inhibitors of receptor tyrosine kinases, such as VEGFRs or basic FGFRs, have been developed as anticancer agents and the invention comprehends coupling any one or more of these peptides to a lipid entity of the invention, e.g., phage IVO peptide(s) (e.g., via or with a PEG terminus), tumor-homing peptide APRPG such as APRPG-PEG-modified. VCAM, the vascular endothelium plays a key role in the pathogenesis of inflammation, thrombosis and atherosclerosis. CAMs are involved in inflammatory disorders, including cancer, and are a logical target, E- and P-selectins, VCAM-1 and ICAMs. Can be used to target a lipid entity of the invention, e.g., with PEGylation.

[0571] Matrix metalloproteases (MMPs) belong to the family of zinc-dependent endopeptidases. They are involved in tissue remodeling, tumor invasiveness, resistance to apoptosis and metastasis. There are four MMP inhibitors called TIMP1-4, which determine the balance between tumor growth inhibition and metastasis; a protein involved in the angiogenesis of tumor vessels is MT1-MMP, expressed on newly formed vessels and tumor tissues. The proteolytic activity of MT1-MMP cleaves proteins, such as fibronectin, elastin, collagen and laminin, at the plasma membrane and activates soluble MMPs, such as MMP-2, which degrades the matrix. An antibody or fragment thereof such as a Fab′ fragment can be used in the practice of the invention such as for an antihuman MT1-MMP monoclonal antibody linked to a lipid entity of the invention, e.g., via a spacer such as a PEG spacer. αβ-integrins or integrins are a group of transmembrane glycoprotein receptors that mediate attachment between a cell and its surrounding tissues or extracellular matrix.

[0572] Integrins contain two distinct chains (heterodimers) called α- and β-subunits. The tumor tissue-specific expression of integrin receptors can be been utilized for targeted delivery in the invention, e.g., whereby the targeting moiety can be an RGD peptide such as a cyclic RGD.

[0573] Aptamers are ssDNA or RNA oligonucleotides that impart high affinity and specific recognition of the target molecules by electrostatic interactions, hydrogen bonding and hydrophobic interactions as opposed to the Watson-Crick base pairing, which is typical for the bonding interactions of oligonucleotides. Aptamers as a targeting moiety can have advantages over antibodies: aptamers can demonstrate higher target antigen recognition as compared with antibodies; aptamers can be more stable and smaller in size as compared with antibodies; aptamers can be easily synthesized and chemically modified for molecular conjugation; and aptamers can be changed in sequence for improved selectivity and can be developed to recognize poorly immunogenic targets. Such moieties as a sgc8 aptamer can be used as a targeting moiety (e.g., via covalent linking to the lipid entity of the invention, e.g., via a spacer, such as a PEG spacer).

[0574] Also, as to active targeting, the invention also comprehends intracellular delivery. Since liposomes follow the endocytic pathway, they are entrapped in the endosomes (pH 6.5-6) and subsequently fuse with lysosomes (pH<5), where they undergo degradation that results in a lower therapeutic potential. The low endosomal pH can be taken advantage of to escape degradation. Fusogenic lipids or peptides, which destabilize the endosomal membrane after the conformational transition/activation at a lowered pH. Amines are protonated at an acidic pH and cause endosomal swelling and rupture by a buffer effect Unsaturated dioleoylphosphatidylethanolamine (DOPE) readily adopts an inverted hexagonal shape at a low pH, which causes fusion of liposomes to the endosomal membrane. This process destabilizes a lipid entity containing DOPE and releases the cargo into the cytoplasm; fusogenic lipid GALA, cholesteryl-GALA and PEG-GALA may show a highly efficient endosomal release; a pore-forming protein listeriolysin O may provide an endosomal escape mechanism; and, histidine-rich peptides have the ability to fuse with the endosomal membrane, resulting in pore formation, and can buffer the proton pump causing membrane lysis.

[0575] The invention comprehends a lipid entity of the invention modified with CPP(s), for intracellular delivery that may proceed via energy dependent macropinocytosis followed by endosomal escape. The invention further comprehends organelle-specific targeting. A lipid entity of the invention surface-functionalized with the triphenylphosphonium (TPP) moiety or a lipid entity of the invention with a lipophilic cation, rhodamine 123 can be effective in delivery of cargo to mitochondria. DOPE/sphingomyelin/stearyl-octa-arginine can delivers cargos to the mitochondrial interior via membrane fusion. A lipid entity of the invention surface modified with a lysosomotropic ligand, octadecyl rhodamine B can deliver cargo to lysosomes. Ceramides are useful in inducing lysosomal membrane permeabilization; the invention comprehends intracellular delivery of a lipid entity of the invention having a ceramide. The invention further comprehends a lipid entity of the invention targeting the nucleus, e.g., via a DNA-intercalating moiety. The invention also comprehends multifunctional liposomes for targeting, i.e., attaching more than one functional group to the surface of the lipid entity of the invention, for instance to enhances accumulation in a desired site and/or promotes organelle-specific delivery and/or target a particular type of cell and/or respond to the local stimuli such as temperature (e.g., elevated), pH (e.g., decreased), respond to externally applied stimuli such as a magnetic field, light, energy, heat or ultrasound and/or promote intracellular delivery of the cargo. All of these are considered actively targeting moieties.

[0576] It should be understood that as to each possible targeting or active targeting moiety herein discussed, there is an embodiment of the invention wherein the delivery system comprises such a targeting or active targeting moiety. Likewise, Table 10 provides exemplary targeting moieties that can be used in the practice of the invention an as to each an embodiment of the invention provides a delivery system that comprises such a targeting moiety.

TABLE 10

| Targeting Moiety | Target Molecule | Target Cell or Tissue |
|---|---|---|
| folate | folate receptor | cancer cells |
| transferrin | transferrin receptor | cancer cells |
| Antibody CC52 | rat CC531 | rat colon adenocarcinoma CC531 |
| anti-HER2 antibody | HER2 | HER2-overexpressing tumors |
| anti-GD2 | GD2 | neuroblastoma, melanoma |
| anti-EGFR | EGFR | tumor cells overexpressing EGFR |
| pH-dependent fusogenic | | ovarian carcinoma |
| peptide diINF-7 | | |
| anti-VEGFR | VEGF Receptor | tumor vasculature |
| anti-CD19 | CD19 (B cell marker) | leukemia, lymphoma |
| cell-penetrating peptide | | blood-brain barrier |
| cyclic arginine-glycine- | avβ3 | glioblastoma cells, human |
| aspartic acid-tyrosine- | | umbilical vein endothelial cells, |
| cysteine peptide | | tumor angiogenesis |
| (c(RGDyC)-LP) | | |
| ASSHN peptide (SEQ | | endothelial progenitor cells; anti- |
| ID NO: 134) | | cancer |
| PR_b peptide | α₅β₁ integrin | cancer cells |
| AG86 peptide | α₆β₄ integrin | cancer cells |
| KCCYSL (SEQ ID NO: | HER-2 receptor | cancer cells |
| 28) (P6.1 peptide) | | |
| affinity peptide LN | Aminopeptidase N | APN-positive tumor |
| (YEVGHRC) (SEQ ID | (APN/CD13) | |
| NO: 29) | | |
| synthetic somatostatin | Somatostatin receptor 2 | breast cancer |
| analogue | (SSTR2) | |
| anti-CD20 monoclonal | B-lymphocytes | B cell lymphoma |
| antibody | | |

[0577] Thus, in an embodiment of the delivery system, the targeting moiety comprises a receptor ligand, such as, for example, hyaluronic acid for CD44 receptor, galactose for hepatocytes, or antibody or fragment thereof such as a binding antibody fragment against a desired surface receptor, and as to each of a targeting moiety comprising a receptor ligand, or an antibody or fragment thereof such as a binding fragment thereof, such as against a desired surface receptor, there is an embodiment of the invention wherein the delivery system comprises a targeting moiety comprising a receptor ligand, or an antibody or fragment thereof such as a binding fragment thereof, such as against a desired surface receptor, or hyaluronic acid for CD44 receptor, galactose for hepatocytes (see, e.g., Surace et al, “Lipoplexes targeting the CD44 hyaluronic acid receptor for efficient transfection of breast cancer cells,” J. Mol Pharm 6(4):1062-73; doi: 10.1021/mp800215d (2009); Sonoke et al, “Galactose-modified cationic liposomes as a liver-targeting delivery system for small interfering RNA,” Biol Pharm Bull. 34(8):1338-42 (2011); Torchilin, “Antibody-modified liposomes for cancer chemotherapy,” Expert Opin. Drug Deliv. 5 (9), 1003-1025 (2008); Manjappa et al, “Antibody derivatization and conjugation strategies: application in preparation of stealth immunoliposome to target chemotherapeutics to tumor,” J. Control. Release 150 (1), 2-22 (2011); Sofou S “Antibody-targeted liposomes in cancer therapy and imaging,” Expert Opin. Drug Deliv. 5 (2): 189-204 (2008); Gao J et al, “Antibody-targeted immunoliposomes for cancer treatment,” Mini. Rev. Med. Chem. 13(14): 2026-2035 (2013); Molavi et al, “Anti-CD30 antibody conjugated liposomal doxorubicin with significantly improved therapeutic efficacy against anaplastic large cell lymphoma,” Biomaterials 34(34):8718-25 (2013), each of which and the documents cited therein are hereby incorporated herein by reference), the teachings of which can be applied and/or adapted for targeted delivery of one or more CRISPR-Cas molecules described herein.

[0578] Other exemplary targeting moieties are described elsewhere herein, such as epitope tags and the like.

### Responsive Delivery

[0579] In some embodiments, the delivery vehicle can allow for responsive delivery of the cargo(s). Responsive delivery, as used in this context herein, refers to delivery of cargo(s) by the delivery vehicle in response to an external stimuli. Examples of suitable stimuli include, without limitation, an energy (light, heat, cold, and the like), a chemical stimuli (e.g., chemical composition, etc.), and a biologic or physiologic stimuli (e.g., environmental pH, osmolarity, salinity, biologic molecule, etc.). In some embodiments, the targeting moiety can be responsive to an external stimuli and facilitate responsive delivery. In other embodiments, responsiveness is determined by a non-targeting moiety component of the delivery vehicle.

[0580] The delivery vehicle can be stimuli-sensitive, e.g., sensitive to an externally applied stimuli, such as magnetic fields, ultrasound or light; and pH-triggering can also be used, e.g., a labile linkage can be used between a hydrophilic moiety such as PEG and a hydrophobic moiety such as a lipid entity of the invention, which is cleaved only upon exposure to the relatively acidic conditions characteristic of the a particular environment or microenvironment such as an endocytic vacuole or the acidotic tumor mass. pH-sensitive copolymers can also be incorporated in embodiments of the invention can provide shielding; diortho esters, vinyl esters, cysteine-cleavable lipopolymers, double esters and hydrazones are a few examples of pH-sensitive bonds that are quite stable at pH 7.5, but are hydrolyzed relatively rapidly at pH 6 and below, e.g., a terminally alkylated copolymer of N-isopropylacrylamide and methacrylic acid that copolymer facilitates destabilization of a lipid entity of the invention and release in compartments with decreased pH value; or, the invention comprehends ionic polymers for generation of a pH-responsive lipid entity of the invention (e.g., poly(methacrylic acid), poly(diethylaminoethyl methacrylate), poly(acrylamide) and poly(acrylic acid)).

[0581] Temperature-triggered delivery is also within the ambit of the invention. Many pathological areas, such as inflamed tissues and tumors, show a distinctive hyperthermia compared with normal tissues. Utilizing this hyperthermia is an attractive strategy in cancer therapy since hyperthermia is associated with increased tumor permeability and enhanced uptake. This technique involves local heating of the site to increase microvascular pore size and blood flow, which, in turn, can result in an increased extravasation of embodiments of the invention. Temperature-sensitive lipid entity of the invention can be prepared from thermosensitive lipids or polymers with a low critical solution temperature. Above the low critical solution temperature (e.g., at site such as tumor site or inflamed tissue site), the polymer precipitates, disrupting the liposomes to release. Lipids with a specific gel-to-liquid phase transition temperature are used to prepare these lipid entities of the invention; and a lipid for a thermosensitive embodiment can be dipalmitoylphosphatidylcholine. Thermosensitive polymers can also facilitate destabilization followed by release, and a useful thermosensitive polymer is poly (N-isopropylacrylamide). Another temperature triggered system can employ lysolipid temperature-sensitive liposomes.

[0582] The invention also comprehends redox-triggered delivery. The difference in redox potential between normal and inflamed or tumor tissues, and between the intra- and extracellular environments has been exploited for delivery, e.g., GSH is a reducing agent abundant in cells, especially in the cytosol, mitochondria and nucleus. The GSH concentrations in blood and extracellular matrix are just one out of 100 to one out of 1000 of the intracellular concentration, respectively. This high redox potential difference caused by GSH, cysteine and other reducing agents can break the reducible bonds, destabilize a lipid entity of the invention and result in release of payload. The disulfide bond can be used as the cleavable/reversible linker in a lipid entity of the invention, because it causes sensitivity to redox owing to the disulfideto-thiol reduction reaction; a lipid entity of the invention can be made reduction sensitive by using two (e.g., two forms of a disulfide-conjugated multifunctional lipid as cleavage of the disulfide bond (e.g., via tris(2-carboxyethyl)phosphine, dithiothreitol, L-cysteine or GSH), can cause removal of the hydrophilic head group of the conjugate and alter the membrane organization leading to release of payload. Calcein release from reduction-sensitive lipid entity of the invention containing a disulfide conjugate can be more useful than a reduction-insensitive embodiment.

[0583] Enzymes can also be used as a trigger to release payload. Enzymes, including MMPs (e.g. MMP2), phospholipase A2, alkaline phosphatase, transglutaminase or phosphatidylinositol-specific phospholipase C, have been found to be overexpressed in certain tissues, e.g., tumor tissues. In the presence of these enzymes, specially engineered enzyme-sensitive lipid entity of the invention can be disrupted and release the payload. an MMP2-cleavable octapeptide (Gly-Pro-Leu-Gly-Ile-Ala-Gly-Gln) (SEQ ID NO: 30) can be incorporated into a linker, and can have antibody targeting, e.g., antibody 2C5.

[0584] The invention also comprehends light-or energy-triggered delivery, e.g., the lipid entity of the invention can be light-sensitive, such that light or energy can facilitate structural and conformational changes, which lead to direct interaction of the lipid entity of the invention with the target cells via membrane fusion, photo-isomerism, photofragmentation or photopolymerization; such a moiety therefor can be benzoporphyrin photosensitizer. Ultrasound can be a form of energy to trigger delivery; a lipid entity of the invention with a small quantity of particular gas, including air or perfluorated hydrocarbon can be triggered to release with ultrasound, e.g., low-frequency ultrasound (LFUS). Magnetic delivery: A lipid entity of the invention can be magnetized by incorporation of magnetites, such as Fe3O4 or γ-Fe203, e.g., those that are less than 10 nm in size. Targeted delivery can be then by exposure to a magnetic field.

### Pharmaceutical Formulations

[0585] Also described herein are pharmaceutical formulations that can contain an amount, effective amount, and/or least effective amount, and/or therapeutically effective amount of one or more compounds, molecules, compositions, vectors, vector systems, cells, or a combination thereof (which are also referred to as the primary active agent or ingredient elsewhere herein) described in greater detail elsewhere herein a pharmaceutically acceptable carrier or excipient. As used herein, “pharmaceutical formulation” refers to the combination of an active agent, compound, or ingredient with a pharmaceutically acceptable carrier or excipient, making the composition suitable for diagnostic, therapeutic, or preventive use in vitro, in vivo, or ex vivo. As used herein, “pharmaceutically acceptable carrier or excipient” refers to a carrier or excipient that is useful in preparing a pharmaceutical formulation that is generally safe, non-toxic, and is neither biologically or otherwise undesirable, and includes a carrier or excipient that is acceptable for veterinary use as well as human pharmaceutical use. A “pharmaceutically acceptable carrier or excipient” as used in the specification and claims includes both one and more than one such carrier or excipient. When present, the compound can optionally be present in the pharmaceutical formulation as a pharmaceutically acceptable salt. In some embodiments, the pharmaceutical formulation can include, such as an active ingredient, a CRISPR-Cas system or component thereof described in greater detail elsewhere herein. In some embodiments, the pharmaceutical formulation can include, such as an active ingredient, a CRISPR-Cas polynucleotide described in greater detail elsewhere herein. In some embodiments, the pharmaceutical formulation can include, such as an active ingredient one or more modified cells, such as one or more modified cells described in greater detail elsewhere herein.

[0586] In some embodiments, the active ingredient is present as a pharmaceutically acceptable salt of the active ingredient. As used herein, “pharmaceutically acceptable salt” refers to any acid or base addition salt whose counter-ions are non-toxic to the subject to which they are administered in pharmaceutical doses of the salts. Suitable salts include, hydrobromide, iodide, nitrate, bisulfate, phosphate, isonicotinate, lactate, salicylate, acid citrate, tartrate, oleate, tannate, pantothenate, bitartrate, ascorbate, succinate, maleate, gentisinate, fumarate, gluconate, glucaronate, saccharate, formate, benzoate, glutamate, methanesulfonate, ethanesulfonate, benzenesulfonate, p-toluenesulfonate, camphorsulfonate, napthalenesulfonate, propionate, malonate, mandelate, malate, phthalate, and pamoate.

[0587] The pharmaceutical formulations described herein can be administered to a subject in need thereof via any suitable method or route to a subject in need thereof. Suitable administration routes can include, but are not limited to auricular (otic), buccal, conjunctival, cutaneous, dental, electro-osmosis, endocervical, endosinusial, endotracheal, enteral, epidural, extra-amniotic, extracorporeal, hemodialysis, infiltration, interstitial, intra-abdominal, intra-amniotic, intra-arterial, intra-articular, intrabiliary, intrabronchial, intrabursal, intracardiac, intracartilaginous, intracaudal, intracavernous, intracavitary, intracerebral, intracisternal, intracorneal, intracoronal (dental), intracoronary, intracorporus cavernosum, intradermal, intradiscal, intraductal, intraduodenal, intradural, intraepidermal, intraesophageal, intragastric, intragingival, intraileal, intralesional, intraluminal, intralymphatic, intramedullary, intrameningeal, intramuscular, intraocular, intraovarian, intrapericardial, intraperitoneal, intrapleural, intraprostatic, intrapulmonary, intrasinal, intraspinal, intrasynovial, intratendinous, intratesticular, intrathecal, intrathoracic, intratubular, intratumor, intratympanic, intrauterine, intravascular, intravenous, intravenous bolus, intravenous drip, intraventricular, intravesical, intravitreal, iontophoresis, irrigation, laryngeal, nasal, nasogastric, occlusive dressing technique, ophthalmic, oral, oropharyngeal, other, parenteral, percutaneous, periarticular, peridural, perineural, periodontal, rectal, respiratory (inhalation), retrobulbar, soft tissue, subarachnoid, subconjunctival, subcutaneous, sublingual, submucosal, topical, transdermal, transmucosal, transplacental, transtracheal, transtympanic, ureteral, urethral, and/or vaginal administration, and/or any combination of the above administration routes, which typically depends on the disease to be treated and/or the active ingredient(s).

[0588] Where appropriate, compounds, molecules, compositions, vectors, vector systems, cells, or a combination thereof described in greater detail elsewhere herein can be provided to a subject in need thereof as an ingredient, such as an active ingredient or agent, in a pharmaceutical formulation. As such, also described are pharmaceutical formulations containing one or more of the compounds and salts thereof, or pharmaceutically acceptable salts thereof described herein. Suitable salts include, hydrobromide, iodide, nitrate, bisulfate, phosphate, isonicotinate, lactate, salicylate, acid citrate, tartrate, oleate, tannate, pantothenate, bitartrate, ascorbate, succinate, maleate, gentisinate, fumarate, gluconate, glucaronate, saccharate, formate, benzoate, glutamate, methanesulfonate, ethanesulfonate, benzenesulfonate, p-toluenesulfonate, camphorsulfonate, napthalenesulfonate, propionate, malonate, mandelate, malate, phthalate, and pamoate.

[0589] In some embodiments, the subject in need thereof has or is suspected of having a hematopoietic disease or a symptom thereof. Exemplary diseases are described in greater detail elsewhere herein, such as in connection with therapeutic methods. As used herein, “agent” refers to any substance, compound, molecule, and the like, which can be biologically active or otherwise can induce a biological and/or physiological effect on a subject to which it is administered to. As used herein, “active agent” or “active ingredient” refers to a substance, compound, or molecule, which is biologically active or otherwise, induces a biological or physiological effect on a subject to which it is administered to. In other words, “active agent” or “active ingredient” refers to a component or components of a composition to which the whole or part of the effect of the composition is attributed. An agent can be a primary active agent, or in other words, the component(s) of a composition to which the whole or part of the effect of the composition is attributed. An agent can be a secondary agent, or in other words, the component(s) of a composition to which an additional part and/or other effect of the composition is attributed.

### Pharmaceutically Acceptable Carriers and Secondary Ingredients and Agents

[0590] The pharmaceutical formulation can include a pharmaceutically acceptable carrier. Suitable pharmaceutically acceptable carriers include, but are not limited to water, salt solutions, alcohols, gum arabic, vegetable oils, benzyl alcohols, polyethylene glycols, gelatin, carbohydrates such as lactose, amylose or starch, magnesium stearate, talc, silicic acid, viscous paraffin, perfume oil, fatty acid esters, hydroxy methylcellulose, and polyvinyl pyrrolidone, which do not deleteriously react with the active composition.

[0591] The pharmaceutical formulations can be sterilized, and if desired, mixed with agents, such as lubricants, preservatives, stabilizers, wetting agents, emulsifiers, salts for influencing osmotic pressure, buffers, coloring, flavoring and/or aromatic substances, and the like which do not deleteriously react with the active compound.

[0592] In some embodiments, the pharmaceutical formulation can also include an effective amount of secondary active agents, including but not limited to, biologic agents or molecules including, but not limited to, e.g. polynucleotides, amino acids, peptides, polypeptides, antibodies, aptamers, ribozymes, hormones, immunomodulators, antipyretics, anxiolytics, antipsychotics, analgesics, antispasmodics, anti-inflammatories, anti-histamines, anti-infectives, chemotherapeutics, imagining agents, sensitizers, and combinations thereof.

### Effective Amounts

[0593] In some embodiments, the amount of the primary active agent and/or optional secondary agent can be an effective amount, least effective amount, and/or therapeutically effective amount. As used herein, “effective amount” refers to the amount of the primary and/or optional secondary agent included in the pharmaceutical formulation that achieve one or more therapeutic effects or desired effect. As used herein, “least effective” amount refers to the lowest amount of the primary and/or optional secondary agent that achieves the one or more therapeutic or other desired effects. As used herein, “therapeutically effective amount” refers to the amount of the primary and/or optional secondary agent included in the pharmaceutical formulation that achieves one or more therapeutic effects. In some embodiments, the one or more therapeutic effects are to modify a nucleic acid in vitro, ex vivo, in situ, or in vivo.

[0594] The effective amount, least effective amount, and/or therapeutically effective amount of the primary and optional secondary active agent described elsewhere herein contained in the pharmaceutical formulation can range from about 0 to 10, 20, 30, 40, 50, 60, 70, 80, 90, 100, 110, 120,130, 140, 150, 160, 170, 180, 190, 200, 210, 220, 230, 240, 250, 260, 270, 280, 290, 300, 310, 320, 330, 340, 350, 360, 370, 380, 390, 400, 410, 420, 430, 440, 450, 460, 470, 480, 490, 500, 510, 520, 530, 540, 550, 560, 570, 580, 590, 600, 610, 620, 630, 640, 650, 660, 670, 680, 690, 700, 710, 720, 730, 740, 750, 760, 770, 780, 790, 800, 810, 820, 830, 840, 850, 860, 870, 880, 890, 900, 910, 920, 930, 940, 950, 960, 970, 980, 990, 1000 pg, ng, μg, mg, or g or be any numerical value with any of these ranges.

[0595] In some embodiments, the effective amount, least effective amount, and/or therapeutically effective amount can be an effective concentration, least effective concentration, and/or therapeutically effective concentration, which can each range from about 0 to 10, 20, 30, 40, 50, 60, 70, 80, 90, 100, 110, 120, 130, 140, 150, 160, 170, 180, 190, 200, 210, 220, 230, 240, 250, 260, 270, 280, 290, 300, 310, 320, 330, 340, 350, 360, 370, 380, 390, 400, 410, 420, 430, 440, 450, 460, 470, 480, 490, 500, 510, 520, 530, 540, 550, 560, 570, 580, 590, 600, 610, 620, 630, 640, 650, 660, 670, 680, 690, 700, 710, 720, 730, 740, 750, 760, 770, 780, 790, 800, 810, 820, 830, 840, 850, 860, 870, 880, 890, 900, 910, 920, 930, 940, 950, 960, 970, 980, 990, 1000 pM, nM, μM, mM, or M or be any numerical value with any of these ranges.

[0596] In other embodiments, the effective amount, least effective amount, and/or therapeutically effective amount of the primary and optional secondary active agent can range from about 0 to 10, 20, 30, 40, 50, 60, 70, 80, 90, 100, 110, 120, 130, 140, 150, 160, 170, 180, 190, 200, 210, 220, 230, 240, 250, 260, 270, 280, 290, 300, 310, 320, 330, 340, 350, 360, 370, 380, 390, 400, 410, 420, 430, 440, 450, 460, 470, 480, 490, 500, 510, 520, 530, 540, 550, 560, 570, 580, 590, 600, 610, 620, 630, 640, 650, 660, 670, 680, 690, 700, 710, 720, 730, 740, 750, 760, 770, 780, 790, 800, 810, 820, 830, 840, 850, 860, 870, 880, 890, 900, 910, 920, 930, 940, 950, 960, 970, 980, 990, 1000 IU or be any numerical value with any of these ranges.

[0597] In some embodiments, the primary and/or the optional secondary active agent present in the pharmaceutical formulation can range from about 0 to 0.001, 0.002, 0.003, 0.004, 0.005, 0.006, 0.007, 0.008, 0.009, 0.01, 0.02, 0.03, 0.04, 0.05, 0.06, 0.07, 0.08, 0.09, 0.1, 0.11, 0.12, 0.13, 0.14, 0.15, 0.16, 0.17, 0.18, 0.19, 0.2, 0.21, 0.22, 0.23, 0.24, 0.25, 0.26, 0.27, 0.28, 0.29, 0.3, 0.31, 0.32, 0.33, 0.34, 0.35, 0.36, 0.37, 0.38, 0.39, 0.4, 0.41, 0.42, 0.43, 0.44, 0.45, 0.46, 0.47, 0.48, 0.49, 0.5, 0.51, 0.52, 0.53, 0.54, 0.55, 0.56, 0.57, 0.58, 0.59, 0.6, 0.61, 0.62, 0.63, 0.64, 0.65, 0.66, 0.67, 0.68, 0.69, 0.7, 0.71, 0.72, 0.73, 0.74, 0.75, 0.76, 0.77, 0.78, 0.79, 0.8, 0.81, 0.82, 0.83, 0.84, 0.85, 0.86, 0.87, 0.88, 0.89, 0.9, 0.91, 0.92, 0.93, 0.94, 0.95, 0.96, 0.97, 0.98, 0.9, to 1, 2, 3, 4, 5, 6, 7, 8, 9, 10, 11, 12, 13, 14, 15, 16, 17, 18, 19, 20, 21, 22, 23, 24, 25, 26, 27, 28, 29, 30, 31, 32, 33, 34, 35, 36, 37, 38, 39, 40, 41, 42, 43, 44, 45, 46, 47, 48, 49, 50, 51, 52, 53, 54, 55, 56, 57, 58, 59, 60, 61, 62, 63, 64, 65, 66, 67, 68, 69, 70, 71, 72, 73, 74, 75, 76, 77, 78, 79, 80, 81, 82, 83, 84, 85, 86, 87, 88, 89, 90, 91, 92, 93, 94, 95, 96, 97, 98, 99, 99.1, 99.2, 99.3, 99.4, 99.5, 99.6, 99.7, 99.8, 99.9% w/w, v/v, or w/v of the pharmaceutical formulation.

[0598] In some embodiments where a cell population is present in the pharmaceutical formulation (e.g., as a primary and/or or secondary active agent), the effective amount of cells can range from about 2 cells to 1×10¹/mL, 1×10²⁰/mL or more, such as about 1×10¹/mL, 1×10²/mL, 1×10³/mL, 1×10⁴/mL, 1×10⁵/mL, 1×10⁶/mL, 1×10⁷/mL, 1×10⁸/mL, 1×10⁹/mL, 1×10¹⁰/mL, 1×10¹¹/mL, 1×10¹²/mL, 1×10¹³/mL, 1×10¹⁴/mL, 1×10¹⁵/mL, 1×10¹⁶/mL, 1×10¹⁷/mL, 1×10¹⁸/mL, 1×10¹⁹/mL, to/or about 1×10²⁰/mL.

[0599] In some embodiments, the amount or effective amount, particularly where an infective particle is being delivered (e.g. a virus particle having the primary or secondary agent as a cargo), the effective amount of virus particles can be expressed as a titer (plaque forming units per unit of volume) or as a MOI (multiplicity of infection). In some embodiments, the effective amount can be 1×10¹ particles per pL, nL, μL, mL, or L to 1×10²⁰/particles per pL, nL, μL, mL, or L or more, such as about 1×10¹, 1×10², 1×10³, 1×10⁴, 1×10⁵, 1×10⁶, 1×10⁷, 1×10⁸, 1×10⁹, 1×10¹⁰, 1×10¹¹, 1×10¹², 1×10¹³, 1×10¹⁴, 1×10¹⁵, 1×10¹⁶, 1×10¹⁷, 1×10¹⁸, 1×10¹⁹, to/or about 1×10²⁰ particles per pL, nL, μL, mL, or L. In some embodiments, the effective titer can be about 1×10¹ transforming units per pL, nL, μL, mL, or L to 1×10²⁰/transforming units per pL, nL, μL, mL, or L or more, such as about 1×10¹, 1×10², 1×10³, 1×10⁴, 1×10⁵, 1×10⁶, 1×10⁷, 1×10⁸, 1×10⁹, 1×10¹⁰, 1×10¹¹, 1×10¹², 1×10¹³, 1×10¹⁴, 1×10¹⁵, 1×10¹⁶, 1×10¹⁷, 1×10¹⁸, 1×10¹⁹, to/or about 1×10²⁰ transforming units per pL, nL, μL, mL, or L. In some embodiments, the MOI of the pharmaceutical formulation can range from about 0.1 to 10 or more, such as 0.1, 0.2, 0.3, 0.4, 0.5, 0.6, 0.7, 0.8, 0.9, 1, 1.1, 1.2, 1.3, 1.4, 1.5, 1.6, 1.7, 1.8, 1.9, 2, 2.1, 2.2, 2.3, 2.4, 2.5, 2.6, 2.7, 2.8, 2.9, 3, 3.1, 3.2, 3.3, 3.4, 3.5, 3.6, 3.7, 3.8, 3.9, 4, 4.1, 4.2, 4.3, 4.4, 4.5, 4.6, 4.7, 4.8, 4.9, 5, 5.1, 5.2, 5.3, 5.4, 5.5, 5.6, 5.7, 5.8, 5.9, 6, 6.1, 6.2, 6.3, 6.4, 6.5, 6.6, 6.7, 6.8, 6.9, 7, 7.1, 7.2, 7.3, 7.4, 7.5, 7.6, 7.7, 7.8, 7.9, 8, 8.1, 8.2, 8.3, 8.4, 8.5, 8.6, 8.7, 8.8, 8.9, 9, 9.1, 9.2, 9.3, 9.4, 9.5, 9.6, 9.7, 9.8, 9.9, 10 or more.

[0600] In some embodiments, the amount or effective amount of the one or more of the active agent(s) described herein contained in the pharmaceutical formulation can range from about 1 pg/kg to about 10 mg/kg based upon the bodyweight of the subject in need thereof or average bodyweight of the specific patient population to which the pharmaceutical formulation can be administered.

[0601] In embodiments where there is a secondary agent contained in the pharmaceutical formulation, the effective amount of the secondary active agent will vary depending on the secondary agent, the primary agent, the administration route, subject age, disease, stage of disease, among other things, which will be one of ordinary skill in the art.

[0602] When optionally present in the pharmaceutical formulation, the secondary active agent can be included in the pharmaceutical formulation or can exist as a stand-alone compound or pharmaceutical formulation that can be administered contemporaneously or sequentially with the compound, derivative thereof, or pharmaceutical formulation thereof.

[0603] In some embodiments, the effective amount of the secondary active agent can range from about 0 to 1, 2, 3, 4, 5, 6, 7, 8, 9, 10, 11, 12, 13, 14, 15, 16, 17, 18, 19, 20, 21, 22, 23, 24, 25, 26, 27, 28, 29, 30, 31, 32, 33, 34, 35, 36, 37, 38, 39, 40, 41, 42, 43, 44, 45, 46, 47, 48, 49, 50, 51, 52, 53, 54, 55, 56, 57, 58, 59, 60, 61, 62, 63, 64, 65, 66, 67, 68, 69, 70, 71, 72, 73, 74, 75, 76, 77, 78, 79, 80, 81, 82, 83, 84, 85, 86, 87, 88, 89, 90, 91, 92, 93, 94, 95, 96, 97, 98, 99, 99.1, 99.2, 99.3, 99.4, 99.5, 99.6, 99.7, 99.8, 99.9% w/w, v/v, or w/v of the total secondary active agent in the pharmaceutical formulation. In additional embodiments, the effective amount of the secondary active agent can range from about 0 to 1, 2, 3, 4, 5, 6, 7, 8, 9, 10, 11, 12, 13, 14, 15, 16, 17, 18, 19, 20, 21, 22, 23, 24, 25, 26, 27, 28, 29, 30, 31, 32, 33, 34, 35, 36, 37, 38, 39, 40, 41, 42, 43, 44, 45, 46, 47, 48, 49, 50, 51, 52, 53, 54, 55, 56, 57, 58, 59, 60, 61, 62, 63, 64, 65, 66, 67, 68, 69, 70, 71, 72, 73, 74, 75, 76, 77, 78, 79, 80, 81, 82, 83, 84, 85, 86, 87, 88, 89, 90, 91, 92, 93, 94, 95, 96, 97, 98, 99, 99.1, 99.2, 99.3, 99.4, 99.5, 99.6, 99.7, 99.8, 99.9% w/w, v/v, or w/v of the total pharmaceutical formulation.

### Dosage Forms

[0604] In some embodiments, the pharmaceutical formulations described herein can be provided in a dosage form. The dosage form can be administered to a subject in need thereof. The dosage form can be effective generate specific concentration, such as an effective concentration, at a given site in the subject in need thereof. As used herein, “dose,” “unit dose,” or “dosage” can refer to physically discrete units suitable for use in a subject, each unit containing a predetermined quantity of the primary active agent, and optionally present secondary active ingredient, and/or a pharmaceutical formulation thereof calculated to produce the desired response or responses in association with its administration. In some embodiments, the given site is proximal to the administration site. In some embodiments, the given site is distal to the administration site. In some cases, the dosage form contains a greater amount of one or more of the active ingredients present in the pharmaceutical formulation than the final intended amount needed to reach a specific region or location within the subject to account for loss of the active components such as via first and second pass metabolism.

[0605] The dosage forms can be adapted for administration by any appropriate route. Appropriate routes include, but are not limited to, oral (including buccal or sublingual), rectal, intraocular, inhaled, intranasal, topical (including buccal, sublingual, or transdermal), vaginal, parenteral, subcutaneous, intramuscular, intravenous, internasal, and intradermal. Other appropriate routes are described elsewhere herein. Such formulations can be prepared by any method known in the art.

[0606] Dosage forms adapted for oral administration can discrete dosage units such as capsules, pellets or tablets, powders or granules, solutions, or suspensions in aqueous or non-aqueous liquids; edible foams or whips, or in oil-in-water liquid emulsions or water-in-oil liquid emulsions. In some embodiments, the pharmaceutical formulations adapted for oral administration also include one or more agents which flavor, preserve, color, or help disperse the pharmaceutical formulation. Dosage forms prepared for oral administration can also be in the form of a liquid solution that can be delivered as a foam, spray, or liquid solution. The oral dosage form can be administered to a subject in need thereof. Where appropriate, the dosage forms described herein can be microencapsulated.

[0607] The dosage form can also be prepared to prolong or sustain the release of any ingredient. In some embodiments, compounds, molecules, compositions, vectors, vector systems, cells, or a combination thereof described herein can be the ingredient whose release is delayed. In some embodiments the primary active agent is the ingredient whose release is delayed. In some embodiments, an optional secondary agent can be the ingredient whose release is delayed. Suitable methods for delaying the release of an ingredient include, but are not limited to, coating or embedding the ingredients in material in polymers, wax, gels, and the like. Delayed release dosage formulations can be prepared as described in standard references such as “Pharmaceutical dosage form tablets,” eds. Liberman et. al. (New York, Marcel Dekker, Inc., 1989), “Remington—The science and practice of pharmacy”, 20th ed., Lippincott Williams & Wlkins, Baltimore, M D, 2000, and “Pharmaceutical dosage forms and drug delivery systems”, 6th Edition, Ansel et al., (Media, PA: Williams and Wilkins, 1995). These references provide information on excipients, materials, equipment, and processes for preparing tablets and capsules and delayed release dosage forms of tablets and pellets, capsules, and granules. The delayed release can be anywhere from about an hour to about 3 months or more.

[0608] Examples of suitable coating materials include, but are not limited to, cellulose polymers such as cellulose acetate phthalate, hydroxypropyl cellulose, hydroxypropyl methylcellulose, hydroxypropyl methylcellulose phthalate, and hydroxypropyl methylcellulose acetate succinate; polyvinyl acetate phthalate, acrylic acid polymers and copolymers, and methacrylic resins that are commercially available under the trade name EUDRAGIT® (Roth Pharma, Westerstadt, Germany), zein, shellac, and polysaccharides.

[0609] Coatings may be formed with a different ratio of water-soluble polymer, water insoluble polymers, and/or pH dependent polymers, with or without water insoluble/water soluble non-polymeric excipient, to produce the desired release profile. The coating is either performed on the dosage form (matrix or simple) which includes, but is not limited to, tablets (compressed with or without coated beads), capsules (with or without coated beads), beads, particle compositions, “ingredient as is” formulated as, but not limited to, suspension form or as a sprinkle dosage form.

[0610] Where appropriate, the dosage forms described herein can be a liposome. In these embodiments, primary active ingredient(s), and/or optional secondary active ingredient(s), and/or pharmaceutically acceptable salt thereof where appropriate are incorporated into a liposome. In embodiments where the dosage form is a liposome, the pharmaceutical formulation is thus a liposomal formulation. The liposomal formulation can be administered to a subject in need thereof.

[0611] Dosage forms adapted for topical administration can be formulated as ointments, creams, suspensions, lotions, powders, solutions, pastes, gels, sprays, aerosols, or oils. In some embodiments for treatments of the eye or other external tissues, for example the mouth or the skin, the pharmaceutical formulations are applied as a topical ointment or cream. When formulated in an ointment, a primary active ingredient, optional secondary active ingredient, and/or pharmaceutically acceptable salt thereof where appropriate can be formulated with a paraffinic or water-miscible ointment base. In other embodiments, the primary and/or secondary active ingredient can be formulated in a cream with an oil-in-water cream base or a water-in-oil base. Dosage forms adapted for topical administration in the mouth include lozenges, pastilles, and mouth washes.

[0612] Dosage forms adapted for nasal or inhalation administration include aerosols, solutions, suspension drops, gels, or dry powders. In some embodiments, a primary active ingredient, optional secondary active ingredient, and/or pharmaceutically acceptable salt thereof where appropriate can be in a dosage form adapted for inhalation is in a particle-size-reduced form that is obtained or obtainable by micronization. In some embodiments, the particle size of the size reduced (e.g. micronized) compound or salt or solvate thereof, is defined by a D₅₀ value of about 0.5 to about 10 microns as measured by an appropriate method known in the art. Dosage forms adapted for administration by inhalation also include particle dusts or mists. Suitable dosage forms wherein the carrier or excipient is a liquid for administration as a nasal spray or drops include aqueous or oil solutions/suspensions of an active (primary and/or secondary) ingredient, which may be generated by various types of metered dose pressurized aerosols, nebulizers, or insufflators. The nasal/inhalation formulations can be administered to a subject in need thereof.

[0613] In some embodiments, the dosage forms are aerosol formulations suitable for administration by inhalation. In some of these embodiments, the aerosol formulation contains a solution or fine suspension of a primary active ingredient, secondary active ingredient, and/or pharmaceutically acceptable salt thereof where appropriate and a pharmaceutically acceptable aqueous or non-aqueous solvent. Aerosol formulations can be presented in single or multi-dose quantities in sterile form in a sealed container. For some of these embodiments, the sealed container is a single dose or multi-dose nasal or an aerosol dispenser fitted with a metering valve (e.g. metered dose inhaler), which is intended for disposal once the contents of the container have been exhausted.

[0614] Where the aerosol dosage form is contained in an aerosol dispenser, the dispenser contains a suitable propellant under pressure, such as compressed air, carbon dioxide, or an organic propellant, including but not limited to a hydrofluorocarbon. The aerosol formulation dosage forms in other embodiments are contained in a pump-atomizer. The pressurized aerosol formulation can also contain a solution or a suspension of a primary active ingredient, optional secondary active ingredient, and/or pharmaceutically acceptable salt thereof. In further embodiments, the aerosol formulation also contains co-solvents and/or modifiers incorporated to improve, for example, the stability and/or taste and/or fine particle mass characteristics (amount and/or profile) of the formulation. Administration of the aerosol formulation can be once daily or several times daily, for example 2, 3, 4, or 8 times daily, in which 1, 2, 3 or more doses are delivered each time. The aerosol formulations can be administered to a subject in need thereof.

[0615] For some dosage forms suitable and/or adapted for inhaled administration, the pharmaceutical formulation is a dry powder inhalable-formulations. In addition to a primary active agent, optional secondary active ingredient, and/or pharmaceutically acceptable salt thereof where appropriate, such a dosage form can contain a powder base such as lactose, glucose, trehalose, mannitol, and/or starch. In some of these embodiments, a primary active agent, secondary active ingredient, and/or pharmaceutically acceptable salt thereof where appropriate is in a particle-size reduced form. In further embodiments, a performance modifier, such as L-leucine or another amino acid, cellobiose octaacetate, and/or metals salts of stearic acid, such as magnesium or calcium stearate. In some embodiments, the aerosol formulations are arranged so that each metered dose of aerosol contains a predetermined amount of an active ingredient, such as the one or more of the compositions, compounds, vector(s), molecules, cells, and combinations thereof described herein.

[0616] Dosage forms adapted for vaginal administration can be presented as pessaries, tampons, creams, gels, pastes, foams, or spray formulations. Dosage forms adapted for rectal administration include suppositories or enemas. The vaginal formulations can be administered to a subject in need thereof.

[0617] Dosage forms adapted for parenteral administration and/or adapted for injection can include aqueous and/or non-aqueous sterile injection solutions, which can contain antioxidants, buffers, bacteriostats, solutes that render the composition isotonic with the blood of the subject, and aqueous and non-aqueous sterile suspensions, which can include suspending agents and thickening agents. The dosage forms adapted for parenteral administration can be presented in a single-unit dose or multi-unit dose containers, including but not limited to sealed ampoules or vials. The doses can be lyophilized and re-suspended in a sterile carrier to reconstitute the dose prior to administration. Extemporaneous injection solutions and suspensions can be prepared in some embodiments, from sterile powders, granules, and tablets. The parenteral formulations can be administered to a subject in need thereof.

[0618] For some embodiments, the dosage form contains a predetermined amount of a primary active agent, secondary active ingredient, and/or pharmaceutically acceptable salt thereof where appropriate per unit dose. In an embodiment, the predetermined amount of primary active agent, secondary active ingredient, and/or pharmaceutically acceptable salt thereof where appropriate can be an effective amount, a least effect amount, and/or a therapeutically effective amount. In other embodiments, the predetermined amount of a primary active agent, secondary active agent, and/or pharmaceutically acceptable salt thereof where appropriate, can be an appropriate fraction of the effective amount of the active ingredient.

### Co-Therapies and Combination Therapies

[0619] In some embodiments, the pharmaceutical formulation(s) described herein can be part of a combination treatment or combination therapy. The combination treatment can include the pharmaceutical formulation described herein and an additional treatment modality. The additional treatment modality can be a chemotherapeutic, a biological therapeutic, surgery, radiation, diet modulation, environmental modulation, a physical activity modulation, and combinations thereof.

[0620] In some embodiments, the co-therapy or combination therapy can additionally include but not limited to, polynucleotides, amino acids, peptides, polypeptides, antibodies, aptamers, ribozymes, hormones, immunomodulators, antipyretics, anxiolytics, antipsychotics, analgesics, antispasmodics, anti-inflammatories, anti-histamines, anti-infectives, chemotherapeutics, imaging agents, sensitizers, and combinations thereof.

### Administration of the Pharmaceutical Formulations

[0621] The pharmaceutical formulations or dosage forms thereof described herein can be administered one or more times hourly, daily, monthly, or yearly (e.g., 1, 2, 3, 4, 5, 6, 7, 8, 9, 10, 11, 12, 13, 14, 15, 16, 17, 18, 19, 20, or more times hourly, daily, monthly, or yearly). In some embodiments, the pharmaceutical formulations or dosage forms thereof described herein can be administered continuously over a period of time ranging from minutes to hours to days. Devices and dosages forms are known in the art and described herein that are effective to provide continuous administration of the pharmaceutical formulations described herein. In some embodiments, the first one or a few initial amount(s) administered can be a higher dose than subsequent doses. This is typically referred to in the art as a loading dose or doses and a maintenance dose, respectively. In some embodiments, the pharmaceutical formulations can be administered such that the doses over time are tapered (increased or decreased) overtime so as to wean a subject gradually off of a pharmaceutical formulation or gradually introduce a subject to the pharmaceutical formulation.

[0622] As previously discussed, the pharmaceutical formulation can contain a predetermined amount of a primary active agent, secondary active agent, and/or pharmaceutically acceptable salt thereof where appropriate. In some of these embodiments, the predetermined amount can be an appropriate fraction of the effective amount of the active ingredient. Such unit doses may therefore be administered once or more than once a day, month, or year (e.g., 1, 2, 3, 4, 5, 6, or more times per day, month, or year). Such pharmaceutical formulations may be prepared by any of the methods well known in the art.

[0623] Where co-therapies or multiple pharmaceutical formulations are to be delivered to a subject, the different therapies or formulations can be administered sequentially or simultaneously. Sequential administration is administration where an appreciable amount of time occurs between administrations, such as more than about 15, 20, 30, 45, 60 minutes or more. The time between administrations in sequential administration can be on the order of hours, days, months, or even years, depending on the active agent present in each administration. Simultaneous administration refers to administration of two or more formulations at the same time or substantially at the same time (e.g., within seconds or just a few minutes apart), where the intent is that the formulations be administered together at the same time.

### Modified Cells and Organisms

### General Discussion

[0624] One or more components of the engineered CRISPR-Cas system described herein, polynucleotides and/or vectors encoding one or more components of the engineered CRISPR-Cas system described herein, and/or one or more viral particles carrying a polynucleotide encoding one or more components of the engineered CRISPR-Cas systems described herein can be delivered to one or more cells. In some embodiments, the cells can be ex vivo. In some embodiments, the cells are in vivo. As such, also described herein are cells that can include and/or express one or more components of the engineered CRISPR-Cas system described herein. Thus, also contemplated herein are organisms that can express in one or more cells one or more component of the engineered CRISPR-Cas system described herein. In some instances, the organism is a mosaic. In some instances, the organism can express one or more components of the engineered CRISPR-Cas system described herein in all cells. The polypeptides, polynucleotides, and vectors described herein can be used to modify one or more cells and/or be used to generate organisms to contain one or more modified cells.

[0625] As used herein, the term “Cas transgenic cell” refers to a cell, such as a eukaryotic cell, in which a Cas gene has been genomically integrated. The nature, type, or origin of the cell are not particularly limiting according to the present invention. Also, the way the Cas transgene is introduced in the cell may vary and can be any method as is known in the art. In certain embodiments, the Cas transgenic cell is obtained by introducing the Cas transgene in an isolated cell. In certain other embodiments, the Cas transgenic cell is obtained by isolating cells from a Cas transgenic organism.

[0626] Applications, uses, and actions of the engineered CRISPR-Cas system described herein and components thereof, such as genome modification of a cell, screening methods, animal model generation, treatment of a diseases are described elsewhere herein.

### Modified Cells

[0627] In some embodiments, the modified cell can be a prokaryotic cell. The prokaryotic cells can be bacterial cells. The bacterial cell can be any suitable strain of bacterial cell.

[0628] In some embodiments, the modified cell can be a eukaryotic cell. The eukaryotic cells may be those of or derived from a particular organism, such as a plant or a mammal, including but not limited to human, or non-human eukaryote or animal or mammal as herein discussed, e.g., mouse, rat, rabbit, dog, livestock, or non-human mammal or primate. In some embodiments, processes for modifying the germ line genetic identity of human beings and/or processes for modifying the genetic identity of animals which are likely to cause them suffering without any substantial medical benefit to man or animal, and also animals resulting from such processes, may be excluded.

[0629] In certain embodiments, the methods as described herein may comprise providing a Cas transgenic cell in which one or more nucleic acids encoding one or more guide RNAs are provided or introduced operably connected in the cell with a regulatory element comprising a promoter of one or more gene of interest. By means of example, and without limitation, the Cas transgenic cell as referred to herein may be derived from a Cas transgenic eukaryote, such as a Cas knock-in eukaryote. Reference is made to WO 2014/093622 (PCT/US13/74667), incorporated herein by reference. Methods of US Patent Publication Nos. 20120017290 and 20110265198 assigned to Sangamo BioSciences, Inc. directed to targeting the Rosa locus may be modified to utilize the CRISPR Cas system of the present invention. Methods of US Patent Publication No. 20130236946 assigned to Cellectis directed to targeting the Rosa locus may also be modified to utilize the CRISPR Cas system of the present invention. By means of further example reference is made to Platt et. al. (Cell; 159(2):440-455 (2014)), describing a Cas9 knock-in mouse, which is incorporated herein by reference and can be adapted for use with the Type II-D CRISPR-Cas systems and components thereof described herein. The Cas transgene can further comprise a Lox-Stop-polyA-Lox (LSL) cassette thereby rendering Cas expression inducible by Cre recombinase. Alternatively, the Cas transgenic cell may be obtained by introducing the Cas transgene in an isolated cell. Delivery systems for transgenes are well known in the art. By means of example, the Cas transgene may be delivered in for instance eukaryotic cell by means of vector (e.g., AAV, adenovirus, lentivirus) and/or particle and/or nanoparticle delivery, as also described herein elsewhere.

[0630] It will be understood by the skilled person that the cell, such as the Cas transgenic cell, as referred to herein may comprise further genomic alterations besides having an integrated Cas gene or the mutations arising from the sequence specific action of Cas when complexed with RNA capable of guiding Cas to a target locus.

[0631] In some embodiments, the cell is a cell obtained from a subject to be treated with a CRISPR-based therapy described herein or a cell line made therefrom. In some embodiments, the cell is a cell not obtained or derived from the subject to be treated with a CRISPR-based therapy described herein. A wide variety of cell lines for tissue culture are known in the art. Examples of cell lines include, but are not limited to, C8161, CCRF-CEM, MOLT, mIMCD-3, NHDF, HeLa-S3, Huh1, Huh4, Huh7, HUVEC, HASMC, HEKn, HEKa, MiaPaCell, Panc1, PC-3, TF1, CTLL-2, C1R, Rat6, CV1, RPTE, A10, T24, J82, A375, ARH-77, Calu1, SW480, SW620, SKOV3, SK-UT, CaCo2, P388D1, SEM-K2, WEHI-231, HB56, TIB55, Jurkat, J45.01, LRMB, Bcl-1, BC-3, IC21, DLD2, Raw264.7, NRK, NRK-52E, MRC5, MEF, Hep G2, HeLa B, HeLa T4, COS, COS-1, COS-6, COS-M6A, BS-C-1 monkey kidney epithelial, BALB/3T3 mouse embryo fibroblast, 3T3 Swiss, 3T3-L1, 132-d5 human fetal fibroblasts; 10.1 mouse fibroblasts, 293-T, 3T3, 721, 9L, A2780, A2780 ADR, A2780cis, A172, A20, A253, A431, A-549, ALC, B16, B35, BCP-1 cells, BEAS-2B, bEnd.3, BHK-21, BR 293, BxPC3, C3H-10T1/2, C6/36, Cal-27, CHO, CHO-7, CHO-IR, CHO-K1, CHO-K2, CHO-T, CHO Dhfr −/−, COR-L23, COR-L23/CPR, COR-L23/5010, COR-L23/R23, COS-7, COV-434, CML T1, CMT, CT26, D17, DH82, DU145, DuCaP, EL4, EM2, EM3, EMT6/AR1, EMT6/AR10.0, FM3, H1299, H69, HB54, HB55, HCA2, HEK-293, HeLa, Hepa1c1c7, HL-60, HMEC, HT-29, Jurkat, JY cells, K562 cells, Ku812, KCL22, KG1, KYO1, LNCap, Ma-Mel 1-48, MC-38, MCF-7, MCF-10A, MDA-MB-231, MDA-MB-468, MDA-MB-435, MDCK II, MDCK II, MOR/0.2R, MONO-MAC 6, MTD-1A, MyEnd, NCI-H69/CPR, NCI-H69/LX10, NCI-H69/LX20, NCI-H69/LX4, NIH-3T3, NALM-1, NW-145, OPCN/OPCT cell lines, Peer, PNT-1A/PNT 2, RenCa, RIN-5F, RMA/RMAS, Saos-2 cells, Sf-9, SkBr3, T2, T-47D, T84, THP1 cell line, U373, U87, U937, VCaP, Vero cells, WM39, WT-49, X63, YAC-1, YAR, and transgenic varieties thereof. Cell lines are available from a variety of sources known to those with skill in the art (see, e.g., the American Type Culture Collection (ATCC) (Manassas, Va.)).

[0632] In some embodiments, a cell transfected with one or more vectors, polynucleotides, proteins, complexes, described herein or a combination thereof is/are used to establish a new cell line comprising one or more vector-derived sequences. In some embodiments, a cell transiently transfected with the components of a CRISPR system as described herein (such as by transient transfection of one or more vectors, or transfection with RNA, and/or CRISPR-Cas complex), and modified through the activity of a CRISPR complex, is used to establish a new cell line comprising cells containing the modification but lacking any other exogenous sequence. In some embodiments, cells transiently or non-transiently transfected with one or more vectors described herein, or cell lines derived from such cells are used in assessing one or more test compounds.

[0633] In some embodiments, the invention provides a eukaryotic host cell comprising (a) a first regulatory element operably linked to a tracr mate sequence and one or more insertion sites for inserting one or more guide sequences upstream of the tracr mate sequence, wherein when expressed, the guide sequence directs sequence-specific binding of a AAV-CRISPR complex to a target sequence in a eukaryotic cell, wherein the AAV-CRISPR complex comprises a AAV-CRISPR enzyme complexed with (1) the guide sequence that is hybridized to the target sequence, and (2) the tracr mate sequence that is hybridized to the tracr sequence; and/or (b) a said AAV-CRISPR enzyme optionally comprising at least one nuclear localization sequence and/or NES. In some embodiments, the host cell comprises components (a) and (b). In some embodiments, component (a), component (b), or components (a) and (b) are stably integrated into a genome of the host eukaryotic cell. In some embodiments, component (b) includes or contains component (a). In some embodiments, component (a) further comprises the tracr sequence downstream of the tracr mate sequence under the control of the first regulatory element. In some embodiments, component (a) further comprises two or more guide sequences operably linked to the first regulatory element, wherein when expressed, each of the two or more guide sequences direct sequence specific binding of an AAV-CRISPR complex to a different target sequence in a eukaryotic cell. In some embodiments, the eukaryotic host cell further comprises a third regulatory element, such as a polymerase III promoter, operably linked to said tracr sequence. In some embodiments, the tracr sequence exhibits at least 50%, 60%, 70%, 80%, 90%, 95%, or 99% of sequence complementarity along the length of the tracr mate sequence when optimally aligned.

[0634] In some embodiments, a eukaryotic host cell contains or otherwise includes (a) a first regulatory element operably linked to a direct repeat sequence and one or more insertion sites for inserting one or more guide RNA sequences up- or downstream (whichever applicable) of the direct repeat sequence, wherein when expressed, the guide sequence(s) direct(s) sequence-specific binding of the Cas CRISPR complex to the respective target sequence(s) in a eukaryotic cell, wherein the Cas CRISPR complex comprises a Cas enzyme complexed with the one or more guide sequence(s) that is hybridized to the respective target sequence(s); and/or (b) a second regulatory element operably linked to an enzyme-coding sequence encoding said Cas enzyme (e.g., a small Type II-D Cas protein or variant described in greater detail elsewhere herein) comprising at least one nuclear localization sequence and/or NES. In some embodiments, the host cell comprises components (a) and (b). Where applicable, a tracr sequence may also be provided. In some embodiments, component (a), component (b), or components (a) and (b) are stably integrated into a genome of the host eukaryotic cell. In some embodiments, component (a) further comprises two or more guide sequences operably linked to the first regulatory element, and optionally separated by a direct repeat, wherein when expressed, each of the two or more guide sequences direct sequence specific binding of a CRISPR-Cas complex to a different target sequence in a eukaryotic cell. In some embodiments, the Cas enzyme comprises one or more nuclear localization sequences and/or nuclear export sequences or NES of sufficient strength to drive accumulation of said Cas enzyme in a detectable amount in and/or out of the nucleus of a eukaryotic cell.

### Modified Organisms

[0635] Also described herein are genetically modified organisms that are generated via a CRISPR-Cas system described in greater detail elsewhere herein. A wide variety of animals, plants, algae, fungi, yeast, etc. and animal, plant, algae, fungus, yeast cell or tissue systems can be engineered for the desired physiological and agronomic characteristics described herein using the nucleic acid constructs of the present disclosure (e.g., the CRISRP-Cas systems described herein) and the various transformation methods mentioned elsewhere herein. In certain embodiments, one or more cells of a plant, animal, algae, fungus, yeast contain one or more polynucleotides, vectors, proteins, complexes or a polynucleotide encoding one or more components of the engineered CRISPR-Cas system described herein. In some embodiments, the polynucleotide(s) encoding one or more components of the engineered CRISPR-Cas system described herein can be stably or transiently incorporated into one or more cells of a plant, animal, algae, fungus, and/or yeast or tissue system. In some embodiments, one or more of the engineered CRISPR-Cas system polynucleotides are genomically incorporated into one or more cells of a plant, animal, algae, fungus, and/or yeast or tissue system. Further embodiments and features of the modified organisms and systems are described elsewhere herein.

[0636] In some embodiments, one or more components of the engineered CRISPR-Cas system described herein is/are expressed in one or more cells of the plant, animal, algae, fungus, yeast, or tissue systems. In some embodiments, the engineered CRISPR-Cas system described herein can act on a target polynucleotide within the one or more cells of the plant, animal, algae, fungus, yeast, or tissue systems to result in sequence modification of the target polynucleotide. The target polynucleotide can be a genomic polynucleotide. The target polynucleotide can be a non-genomic polynucleotide. Additional methods of polynucleotide modification using the engineered CRISPR-Cas system described herein are provided elsewhere herein.

[0637] In some embodiments, a non-human eukaryotic organism; preferably a multicellular eukaryotic organism, containing a eukaryotic host cell containing one or more components of a engineered CRISPR-Cas system described herein according to any of the described embodiments. In some embodiments, a eukaryotic organism; preferably a multicellular eukaryotic organism, comprising a eukaryotic host cell containing one or more components of an engineered CRISPR-Cas system described herein according to any of the described embodiments. Advantageously the organism is a host of AAV.

[0638] The methods for genome editing also described elsewhere herein using the Cas system as described herein can be used to confer desired traits on essentially any animal plant, algae, fungus, yeast, etc. A wide variety of animals, plants, algae, fungus, yeast, etc. and plant algae, fungus, yeast cell or tissue systems may be engineered for the desired physiological and agronomic characteristics described herein using the nucleic acid constructs of the present disclosure and the various transformation and/or delivery methods described elsewhere herein. Various methods (e.g. delivery and transformation methods) described elsewhere herein can result in the generation of “improved animals, plants, algae, fungi, yeast, etc.” in that they have one or more desirable traits compared to the wildtype animal, plant, algae, fungi, yeast, etc. In particular embodiments, the plants, algae, fungi, yeast, etc., cells or parts obtained are transgenic plants, comprising an exogenous DNA sequence incorporated into the genome of all or part of the cells. In particular embodiments, non-transgenic genetically modified animals, plants, algae, fungi, yeast, etc., parts or cells are obtained, in that no exogenous DNA sequence is incorporated into the genome of any of the cells of the modified animals, plants, algae, fungi, yeast, etc. In such embodiments, the improved animals, plants, algae, fungi, yeast, etc. are non-transgenic. Accordingly, as used herein, a “non-transgenic” animal, plant, algae, fungi, yeast, etc. or cell thereof is an animal, plant, algae, fungi, yeast, etc. or cell thereof which does not contain a foreign DNA stably integrated into its genome.

[0639] Thus, the invention provides a plant, animal or cell, produced by any one or more of the methods described herein, or a progeny thereof. The progeny may be a clone of the produced plant or animal or may result from sexual reproduction by crossing with other individuals of the same species to introgress further desirable traits into their offspring. The cell may be in vivo or ex vivo in the cases of multicellular organisms, particularly animals or plants.

[0640] Where only the modification of an endogenous gene is ensured and no foreign genes are introduced or maintained in the animal, plant, algae, fungi, yeast, etc. genome, the resulting genetically modified crops contain no foreign genes and can thus basically be considered non-transgenic but yet are not identical to the natural state or wild-type. The different applications of the CRISPR-Cas system for animal, plant, algae, fungi, yeast, etc. genome editing include, but are not limited to: introduction of one or more foreign genes to confer a performance, and/or agricultural trait of interest; editing of endogenous genes to confer a performance and/or agricultural trait of interest; modulating of endogenous genes by the CRISPR-Cas system to confer a performance and/or agricultural trait of interest.

[0641] In particular embodiments, the methods described herein are used to modify endogenous genes or to modify their expression without the permanent introduction into the genome of the animal, plant, algae, fungus, yeast, etc. of any foreign gene, including those encoding CRISPR components, so as to avoid the presence of foreign DNA in the genome of the plant.

### Modified Animals

[0642] The organism in some embodiments may be an animal, for example, a mammal. In certain embodiments, the organism is a non-human mammal. In some embodiments, a non-human eukaryotic organism; preferably a multicellular eukaryotic organism, including a eukaryotic host cell according to any of the described embodiments. In some embodiments, a eukaryotic organism; preferably a multicellular eukaryotic organism, includes a eukaryotic host cell according to any of the described embodiments. Also, the organism may be an arthropod such as an insect. The present invention may also be extended to other agricultural applications such as, for example, farm and production animals. For example, pigs have many features that make them attractive as biomedical models, especially in regenerative medicine. In particular, pigs with severe combined immunodeficiency (SCID) may provide useful models for regenerative medicine, xenotransplantation (discussed also elsewhere herein), and tumor development and will aid in developing therapies for human SCID patients. Lee et al., (Proc Natl Acad Sci USA. 2014 May 20; 111(20):7260-5) utilized a reporter-guided transcription activator-like effector nuclease (TALEN) system to generated targeted modifications of recombination activating gene (RAG) 2 in somatic cells at high efficiency, including some that affected both alleles.

[0643] The methods of Lee et al., (Proc Natl Acad Sci USA. 2014 May 20; 111(20):7260-5) may be applied to the present invention analogously as follows. Mutated pigs are produced by targeted modification of RAG2 in fetal fibroblast cells followed by SCNT and embryo transfer. Constructs coding for CRISPR Cas and a reporter are electroporated into fetal-derived fibroblast cells. After 48 h, transfected cells expressing the green fluorescent protein are sorted into individual wells of a 96-well plate at an estimated dilution of a single cell per well. Targeted modification of RAG2 are screened by amplifying a genomic DNA fragment flanking any CRISPR Cas cutting sites followed by sequencing the PCR products. After screening and ensuring lack of off-site mutations, cells carrying targeted modification of RAG2 are used for SCNT. The polar body, along with a portion of the adjacent cytoplasm of oocyte, presumably containing the metaphase II plate, are removed, and a donor cell are placed in the perivitelline. The reconstructed embryos are then electrically porated to fuse the donor cell with the oocyte and then chemically activated. The activated embryos are incubated in Porcine Zygote Medium 3 (PZM3) with 0.5 μM Scriptaid (S7817; Sigma-Aldrich) for 14-16 h. Embryos are then washed to remove the Scriptaid and cultured in PZM3 until they were transferred into the oviducts of surrogate pigs.

[0644] The present invention is also applicable to modifying SNPs of other animals, such as cows. Tan et al. (Proc Natl Acad Sci USA. 2013 Oct. 8; 110(41): 16526-16531) expanded the livestock gene editing toolbox to include transcription activator-like (TAL) effector nuclease (TALEN)- and clustered regularly interspaced short palindromic repeats (CRISPR)/Cas (e.g., Type II-D Cas)-stimulated homology-directed repair (HDR) using plasmid, rAAV, and oligonucleotide templates. Gene specific gRNA sequences were cloned into the Church lab gRNA vector (Addgene ID: 41824) according to their methods (Mali P, et al. (2013) RNA-Guided Human Genome Engineering via Cas9. Science 339(6121):823-826). The Cas9 nuclease was provided either by co-transfection of the hCas9 plasmid (Addgene ID: 41815) or mRNA synthesized from RCIScript-hCas9. This RCIScript-hCas9 was constructed by sub-cloning the XbaI-AgeI fragment from the hCas9 plasmid (encompassing the hCas9 cDNA) into the RCIScript plasmid. Similar approaches can be applied in the case of the Type II-D Cas proteins and systems thereof of the present invention.

[0645] Heo et al. (Stem Cells Dev. 2015 Feb. 1; 24(3):393-402. doi: 10.1089/scd.2014.0278. Epub 2014 Nov. 3) reported highly efficient gene targeting in the bovine genome using bovine pluripotent cells and clustered regularly interspaced short palindromic repeat (CRISPR)/Cas9 nuclease. First, Heo et al. generate induced pluripotent stem cells (iPSCs) from bovine somatic fibroblasts by the ectopic expression of yamanaka factors and GSK30 and MEK inhibitor (2i) treatment. Heo et al. observed that these bovine iPSCs are highly similar to naïve pluripotent stem cells with regard to gene expression and developmental potential in teratomas. Moreover, CRISPR-Cas9 nuclease, which was specific for the bovine NANOG locus, showed highly efficient editing of the bovine genome in bovine iPSCs and embryos. A similar approach can be applied and/or adapted for use with the Cas (e.g., Type II-D Cas) proteins of the CRISPR-Cas systems described herein.

[0646] Igenity® provides a profile analysis of animals, such as cows, to perform and transmit traits of economic traits of economic importance, such as carcass composition, carcass quality, maternal and reproductive traits and average daily gain. The analysis of a comprehensive Igenity® profile begins with the discovery of DNA markers (most often single nucleotide polymorphisms or SNPs). All the markers behind the Igenity® profile were discovered by independent scientists at research institutions, including universities, research organizations, and government entities such as USDA. Markers are then analyzed at Igenity® in validation populations. Igenity® uses multiple resource populations that represent various production environments and biological types, often working with industry partners from the seedstock, cow-calf, feedlot and/or packing segments of the beef industry to collect phenotypes that are not commonly available. Cattle genome databases are widely available, see, e.g., the NAGRP Cattle Genome Coordination Program (http://www.animalgenome.org/cattle/maps/db.html). Thus, the present invention maybe applied to target bovine SNPs. One of skill in the art may utilize the above protocols for targeting SNPs and apply them to bovine SNPs as described, for example, by Tan et al. or Heo et al.

[0647] Qingjian Zou et al. (Journal of Molecular Cell Biology Advance Access published Oct. 12, 2015) demonstrated increased muscle mass in dogs by targeting the first exon of the dog Myostatin (MSTN) gene (a negative regulator of skeletal muscle mass). First, the efficiency of the sgRNA was validated, using cotransfection of the sgRNA targeting MSTN with a Cas9 vector into canine embryonic fibroblasts (CEFs). Thereafter, MSTN KO dogs were generated by micro-injecting embryos with normal morphology with a mixture of Cas9 mRNA and MSTN sgRNA and auto-transplantation of the zygotes into the oviduct of the same female dog. The knock-out puppies displayed an obvious muscular phenotype on thighs compared with its wild-type littermate sister. Similar approaches can be applied and/or adapted for the CRISPR-Cas systems incorporating one or more Cas (e.g., Type II-D Cas) proteins described elsewhere herein.

[0648] Viral targets in livestock may include, in some embodiments, porcine CD163, for example on porcine macrophages. CD163 is associated with infection (thought to be through viral cell entry) by PRRSv (Porcine Reproductive and Respiratory Syndrome virus, an arterivirus). Infection by PRRSv, especially of porcine alveolar macrophages (found in the lung), results in a previously incurable porcine syndrome (“Mystery swine disease” or “blue ear disease”) that causes suffering, including reproductive failure, weight loss and high mortality rates in domestic pigs. Opportunistic infections, such as enzootic pneumonia, meningitis and ear oedema, are often seen due to immune deficiency through loss of macrophage activity. It also has significant economic and environmental repercussions due to increased antibiotic use and financial loss (an estimated $660m per year).

[0649] As reported by Kristin M Whitworth and Dr Randall Prather et al. (Nature Biotech 3434 published online 7 Dec. 2015) at the University of Missouri and in collaboration with Genus Plc, CD163 was targeted using CRISPR-Cas9 and the offspring of edited pigs were resistant when exposed to PRRSv. One founder male and one founder female, both of whom had mutations in exon 7 of CD163, were bred to produce offspring. The founder male possessed an 11-bp deletion in exon 7 on one allele, which results in a frameshift mutation and missense translation at amino acid 45 in domain 5 and a subsequent premature stop codon at amino acid 64. The other allele had a 2-bp addition in exon 7 and a 377-bp deletion in the preceding intron, which were predicted to result in the expression of the first 49 amino acids of domain 5, followed by a premature stop code at amino acid 85. The sow had a 7 bp addition in one allele that when translated was predicted to express the first 48 amino acids of domain 5, followed by a premature stop codon at amino acid 70. The sow's other allele was unamplifiable. Selected offspring were predicted to be a null animal (CD163−/−), i.e., a CD163 knock out.

[0650] Accordingly, in some embodiments, porcine alveolar macrophages may be targeted by the CRISPR proteins (e.g., the Type II-D Cas proteins) described herein. In some embodiments, porcine CD163 may be targeted by the CRISPR protein. In some embodiments, porcine CD163 may be knocked out through induction of a DSB or through insertions or deletions, for example targeting deletion or modification of exon 7, including one or more of those described above, or in other regions of the gene, for example deletion or modification of exon 5.

[0651] An edited pig and its progeny are also envisaged, for example a CD163 knock out pig. This may be for livestock, breeding or modelling purposes (i.e. a porcine model). Semen comprising the gene knock out is also provided.

[0652] CD163 is a member of the scavenger receptor cysteine-rich (SRCR) superfamily. Based on in vitro studies SRCR domain 5 of the protein is the domain responsible for unpackaging and release of the viral genome. As such, other members of the SRCR superfamily may also be targeted in order to assess resistance to other viruses. PRRSV is also a member of the mammalian arterivirus group, which also includes murine lactate dehydrogenase-elevating virus, simian hemorrhagic fever virus and equine arteritis virus. The arteriviruses share important pathogenesis properties, including macrophage tropism and the capacity to cause both severe disease and persistent infection. Accordingly, arteriviruses, and in particular murine lactate dehydrogenase-elevating virus, simian hemorrhagic fever virus and equine arteritis virus, may be targeted, for example through porcine CD163 or homologues thereof in other species, and murine, simian and equine models and knockout also provided.

[0653] Indeed, this approach may be extended to viruses or bacteria that cause other livestock diseases that may be transmitted to humans, such as Swine Influenza Virus (SIV) strains which include influenza C and the subtypes of influenza A known as H1N1, H1N2, H2N1, H3N1, H3N2, and H2N3, as well as pneumonia, meningitis and oedema mentioned above.

[0654] Kabadi et al. (Nucleic Acids Res. 2014 Oct. 29; 42(19):e147. doi: 10.1093/nar/gku749. Epub 2014 Aug. 13) developed a single lentiviral system to express a Cas9 variant, a reporter gene and up to four sgRNAs from independent RNA polymerase III promoters that are incorporated into the vector by a convenient Golden Gate cloning method. Each sgRNA was efficiently expressed and can mediate multiplex gene editing and sustained transcriptional activation in immortalized and primary human cells. The methods of Kabadi et al. may be applied to the Cas (e.g., the Type II-D Cas) effector protein and systems thereof of the present invention.

### Modified Plants and Algae

[0655] The present invention also provides plants cells obtainable and obtained by the methods provided herein. The improved plants obtained by the methods described herein may be useful in food or feed production through expression of genes which, for instance ensure tolerance to plant pests, herbicides, drought, low or high temperatures, excessive water, etc.

[0656] The improved plants obtained by the methods described herein, especially crops and algae may be useful in food or feed production through expression of, for instance, higher protein, carbohydrate, nutrient or vitamin levels than would normally be seen in the wildtype. In this regard, improved plants, especially pulses and tubers are preferred.

[0657] Improved algae or other plants such as rape may be particularly useful in the production of vegetable oils or biofuels such as alcohols (especially methanol and ethanol), for instance. These may be engineered to express or overexpress high levels of oil or alcohols for use in the oil or biofuel industries.

[0658] The invention also provides for improved parts of a plant. Plant parts include, but are not limited to, leaves, stems, roots, tubers, seeds, endosperm, ovule, and pollen. Plant parts as envisaged herein may be viable, nonviable, regeneratable, and/or non-regeneratable.

[0659] It is also encompassed herein to provide plant cells and plants generated according to the methods of the invention. Gametes, seeds, embryos, either zygotic or somatic, progeny or hybrids of plants comprising the genetic modification, which are produced by traditional breeding methods, are also included within the scope of the present invention. Such plants may contain a heterologous or foreign DNA sequence inserted at or instead of a target sequence. Alternatively, such plants may contain only an alteration (mutation, deletion, insertion, substitution) in one or more nucleotides. As such, such plants will only be different from their progenitor plants by the presence of the particular modification.

[0660] In some embodiments, the modified organism is a plant. In general, the term “plant” relates to any various photosynthetic, eukaryotic, unicellular or multicellular organism of the kingdom Plantae characteristically growing by cell division, containing chloroplasts, and having cell walls comprised of cellulose. The term plant encompasses monocotyledonous and dicotyledonous plants. Specifically, the plants are intended to comprise without limitation angiosperm and gymnosperm plants such as acacia, alfalfa, amaranth, apple, apricot, artichoke, ash tree, asparagus, avocado, banana, barley, beans, beet, birch, beech, blackberry, blueberry, broccoli, Brussel's sprouts, cabbage, canola, cantaloupe, carrot, cassava, cauliflower, cedar, a cereal, celery, chestnut, cherry, Chinese cabbage, citrus, clementine, clover, coffee, corn, cotton, cowpea, cucumber, cypress, eggplant, elm, endive, eucalyptus, fennel, figs, fir, geranium, grape, grapefruit, groundnuts, ground cherry, gum hemlock, hickory, kale, kiwifruit, kohlrabi, larch, lettuce, leek, lemon, lime, locust, pine, maidenhair, maize, mango, maple, melon, millet, mushroom, mustard, nuts, oak, oats, oil palm, okra, onion, orange, an ornamental plant or flower or tree, papaya, palm, parsley, parsnip, pea, peach, peanut, pear, peat, pepper, persimmon, pigeon pea, pine, pineapple, plantain, plum, pomegranate, potato, pumpkin, radicchio, radish, rapeseed, raspberry, rice, rye, sorghum, safflower, sallow, soybean, spinach, spruce, squash, strawberry, sugar beet, sugarcane, sunflower, sweet potato, sweet corn, tangerine, tea, tobacco, tomato, trees, triticale, turf grasses, turnips, vine, walnut, watercress, watermelon, wheat, yams, yew, and zucchini. The term plant also encompasses Algae, which are mainly photoautotrophs unified primarily by their lack of roots, leaves and other organs that characterize higher plants.

[0661] The methods for genome editing using the CRISPR-Cas system as described herein can be used to confer desired traits on essentially any plant. A wide variety of plants and plant cell systems may be engineered for the desired physiological and agronomic characteristics described herein using the nucleic acid constructs of the present disclosure and the various transformation methods mentioned above. In preferred embodiments, target plants and plant cells for engineering include, but are not limited to, those monocotyledonous and dicotyledonous plants, such as crops including grain crops (e.g., wheat, maize, rice, millet, barley), fruit crops (e.g., tomato, apple, pear, strawberry, orange), forage crops (e.g., alfalfa), root vegetable crops (e.g., carrot, potato, sugar beets, yam), leafy vegetable crops (e.g., lettuce, spinach); flowering plants (e.g., petunia, rose, chrysanthemum), conifers and pine trees (e.g., pine fir, spruce); plants used in phytoremediation (e.g., heavy metal accumulating plants); oil crops (e.g., sunflower, rape seed) and plants used for experimental purposes (e.g., Arabidopsis). Thus, the methods and CRISPR-Cas systems can be used over a broad range of plants, such as for example with dicotyledonous plants belonging to the orders Magniolales, Illiciales, Laurales, Piperales, Aristochiales, Nymphaeales, Ranunculales, Papeverales, Sarraceniaceae, Trochodendrales, Hamamelidales, Eucomiales, Leitneriales, Myricales, Fagales, Casuarinales, Caryophyllales, Batales, Polygonales, Plumbaginales, Dilleniales, Theales, Malvales, Urticales, Lecythidales, Violales, Salicales, Capparales, Ericales, Diapensales, Ebenales, Primulales, Rosales, Fabales, Podostemales, Haloragales, Myrtales, Cornales, Proteales, San tales, Rafflesiales, Celastrales, Euphorbiales, Rhamnales, Sapindales, Juglandales, Geraniales, Polygalales, Umbellales, Gentianales, Polemoniales, Lamiales, Plantaginales, Scrophulariales, Campanulales, Rubiales, Dipsacales, and Asterales; the methods and CRISPR-Cas systems can be used with monocotyledonous plants such as those belonging to the orders Alismatales, Hydrocharitales, Najadales, Triuridales, Commelinales, Eriocaulales, Restionales, Poales, Juncales, Cyperales, Typhales, Bromeliales, Zingiberales, Arecales, Cyclanthales, Pandanales, Arales, Lilliales, and Orchid ales, or with plants belonging to Gymnospermae, e.g., those belonging to the orders Pinales, Ginkgoales, Cycadales, Araucariales, Cupressales and Gnetales.

[0662] The CRISPR-Cas systems and methods of use described herein can be used over a broad range of plant species, included in the non-limitative list of dicot, monocot or gymnosperm genera hereunder: Atropa, Alseodaphne, Anacardium, Arachis, Beilschmiedia, Brassica, Carthamus, Cocculus, Croton, Cucumis, Citrus, Citrullus, Capsicum, Catharanthus, Cocos, Coffea, Cucurbita, Daucus, Duguetia, Eschscholzia, Ficus, Fragaria, Glaucium, Glycine, Gossypium, Helianthus, Hevea, Hyoscyamus, Lactuca, Landolphia, Linum, Litsea, Lycopersicon, Lupinus, Manihot, Majorana, Malus, Medicago, Nicotiana, Olea, Parthenium, Papaver, Persea, Phaseolus, Pistacia, Pisum, Pyrus, Prunus, Raphanus, Ricinus, Senecio, Sinomenium, Stephania, Sinapis, Solanum, Theobroma, Trifolium, Trigonella, Vicia, Vinca, Vilis, and Vigna; and the genera Allium, Andropogon, Aragrostis, Asparagus, Avena, Cynodon, Elaeis, Festuca, Festulolium, Heterocallis, Hordeum, Lemna, Lolium, Musa, Oryza, Panicum, Pannesetum, Phleum, Poa, Secale, Sorghum, Triticum, Zea, Abies, Cunninghamia, Ephedra, Picea, Pinus, and Pseudotsuga.

[0663] The CRISPR-Cas systems and methods of use can also be used over a broad range of “algae” or “algae cells”; including for example algae selected from several eukaryotic phyla, including the Rhodophyta (red algae), Chlorophyta (green algae), Phaeophyta (brown algae), Bacillariophyta (diatoms), Eustigmatophyta and dinoflagellates as well as the prokaryotic phylum Cyanobacteria (blue-green algae). The term “algae” includes for example algae selected from: Amphora, Anabaena, Anikstrodesmis, Botryococcus, Chaetoceros, Chlamydomonas, Chlorella, Chlorococcum, Cyclotella, Cylindrotheca, Dunaliella, Emiliana, Euglena, Hematococcus, Isochrysis, Monochrysis, Monoraphidium, Nannochloris, Nannnochloropsis, Navicula, Nephrochloris, Nephroselmis, Nitzschia, Nodularia, Nostoc, Oochromonas, Oocystis, Oscillartoria, Pavlova, Phaeodactylum, Playtmonas, Pleurochrysis, Porhyra, Pseudoanabaena, Pyramimonas, Stichococcus, Synechococcus, Synechocystis, Tetraselmis, Thalassiosira, and Trichodesmium.

[0664] A part of a plant, i.e., a “plant tissue” may be treated according to the methods of the present invention to produce an improved plant. Plant tissue also encompasses plant cells. The term “plant cell” as used herein refers to individual units of a living plant, either in an intact whole plant or in an isolated form grown in in vitro tissue cultures, on media or agar, in suspension in a growth media or buffer or as a part of higher organized unites, such as, for example, plant tissue, a plant organ, or a whole plant.

[0665] A “protoplast” refers to a plant cell that has had its protective cell wall completely or partially removed using, for example, mechanical or enzymatic means resulting in an intact biochemical competent unit of living plant that can reform their cell wall, proliferate and regenerate grow into a whole plant under proper growing conditions.

[0666] The term “transformation” broadly refers to the process by which a plant host is genetically modified by the introduction of DNA by means of Agrobacteria or one of a variety of chemical or physical methods. As used herein, the term “plant host” refers to plants, including any cells, tissues, organs, or progeny of the plants. Many suitable plant tissues or plant cells can be transformed and include, but are not limited to, protoplasts, somatic embryos, pollen, leaves, seedlings, stems, calli, stolons, microtubers, and shoots. A plant tissue also refers to any clone of such a plant, seed, progeny, propagule whether generated sexually or asexually, and descendants of any of these, such as cuttings or seed.

[0667] The term “transformed” as used herein, refers to a cell, tissue, organ, or organism into which a foreign DNA molecule, such as a construct, has been introduced. The introduced DNA molecule may be integrated into the genomic DNA of the recipient cell, tissue, organ, or organism such that the introduced DNA molecule is transmitted to the subsequent progeny. In these embodiments, the “transformed” or “transgenic” cell or plant may also include progeny of the cell or plant and progeny produced from a breeding program employing such a transformed plant as a parent in a cross and exhibiting an altered phenotype resulting from the presence of the introduced DNA molecule. Preferably, the transgenic plant is fertile and capable of transmitting the introduced DNA to progeny through sexual reproduction.

[0668] The term “progeny”, such as the progeny of a transgenic plant, is one that is born of, begotten by, or derived from a plant or the transgenic plant. The introduced DNA molecule may also be transiently introduced into the recipient cell such that the introduced DNA molecule is not inherited by subsequent progeny and thus not considered “transgenic”.

[0669] The term “plant promoter” as used herein is a promoter capable of initiating transcription in plant cells, whether or not its origin is a plant cell. Exemplary suitable plant promoters include, but are not limited to, those that are obtained from plants, plant viruses, and bacteria such as Agrobacterium or Rhizobium which comprise genes expressed in plant cells.

[0670] One or more components of the CRISPR-Cas system described herein can be stably or transiently integrated into the genome of plants and plant cells.

[0671] In particular embodiments, it is envisaged that the polynucleotides encoding the components of the CRISPR-Cas system are introduced for stable integration into the genome of a plant cell. In these embodiments, the design of the transformation vector or the expression system can be adjusted depending on for when, where and under what conditions the guide RNA and/or the Cas (e.g., Type II-D Cas) protein gene(s) are expressed.

[0672] In particular embodiments, it is envisaged to introduce the components of the CRISPR-Cas system stably into the genomic DNA of a plant cell. Additionally or alternatively, the components of the CRISPR-Cas system are introduced for stable integration into the DNA of a plant organelle such as, but not limited to a plastid, e mitochondrion or a chloroplast.

[0673] The expression system for stable integration into the genome of a plant cell may contain one or more of the following elements: a promoter element that can be used to express the RNA and/or CRISPR-Cas enzyme in a plant cell; a 5′ untranslated region to enhance expression; an intron element to further enhance expression in certain cells, such as monocot cells; a multiple-cloning site to provide convenient restriction sites for inserting the guide RNA and/or the CRISPR-Cas gene sequences and other desired elements; and a 3′ untranslated region to provide for efficient termination of the expressed transcript.

[0674] The elements of the expression system may be on one or more expression constructs which are either circular such as a plasmid or transformation vector, or non-circular such as linear double stranded DNA.

[0675] In a particular embodiment, a Cfp1 CRISPR expression system comprises at least a nucleotide sequence encoding a guide RNA (gRNA) that hybridizes with a target sequence in a plant, and wherein the guide RNA comprises a guide sequence and a direct repeat sequence, and a nucleotide sequence encoding a CRISPR-Cas protein, wherein components (a) or (b) are located on the same or on different constructs, and whereby the different nucleotide sequences can be under control of the same or a different regulatory element operable in a plant cell.

[0676] DNA construct(s) containing the components of the CRISPR-Cas system, and, where applicable, template sequence may be introduced into the genome of a plant, plant part, or plant cell by a variety of conventional techniques. The process generally comprises the steps of selecting a suitable host cell or host tissue, introducing the construct(s) into the host cell or host tissue, and regenerating plant cells or plants therefrom.

[0677] In particular embodiments, the DNA construct may be introduced into the plant cell using techniques such as but not limited to electroporation, microinjection, aerosol beam injection of plant cell protoplasts, or the DNA constructs can be introduced directly to plant tissue using biolistic methods, such as DNA particle bombardment (see also Fu et al., Transgenic Res. 2000 February; 9(1):11-9). The basis of particle bombardment is the acceleration of particles coated with gene/s of interest toward cells, resulting in the penetration of the protoplasm by the particles and typically stable integration into the genome. (see e.g., Klein et al, Nature (1987), Klein et ah, Bio/Technology (1992), Casas et ah, Proc. Natl. Acad. Sci. USA (1993)).

[0678] In particular embodiments, the DNA constructs containing components of the CRISPR-Cas system may be introduced into the plant by Agrobacterium-mediated transformation. The DNA constructs may be combined with suitable T-DNA flanking regions and introduced into a conventional Agrobacterium tumefaciens host vector. The foreign DNA can be incorporated into the genome of plants by infecting the plants or by incubating plant protoplasts with Agrobacterium bacteria, containing one or more Ti (tumor-inducing) plasmids. (see e.g., Fraley et al., (1985), Rogers et al., (1987) and U.S. Pat. No. 5,563,055).

[0679] The CRISPR systems provided herein can be used to introduce targeted double-strand or single-strand breaks and/or to introduce into one or more plant cells or entire plants gene activator and or repressor systems and without being limitative, can be used for gene targeting, gene replacement, targeted mutagenesis, targeted deletions or insertions, targeted inversions and/or targeted translocations. By co-expression of multiple targeting polynucleotides (e.g.) RNAs directed to achieve multiple modifications in a single cell, multiplexed genome modification can be ensured. This technology can be used to high-precision engineering of plants with improved characteristics, including enhanced nutritional quality, increased resistance to diseases and resistance to biotic and abiotic stress, and increased production of commercially valuable plant products or heterologous compounds.

[0680] In particular embodiments, the methods described herein are used to modify endogenous genes or to modify their expression without the permanent introduction into the genome of the plant, including those encoding CRISPR components, so as to avoid the presence of foreign DNA in the genome of the plant. This can be of interest as the regulatory requirements for non-transgenic plants are less rigorous.

[0681] Exemplary genes conferring agronomic traits include, but are not limited to, genes that confer resistance to pests or diseases; genes involved in plant diseases, such as those listed in WO 2013046247; genes that confer resistance to herbicides, fungicides, or the like; genes involved in (abiotic) stress tolerance. Other aspects of the use of the CRISPR-Cas system include, but are not limited to: create (male) sterile plants; increasing the fertility stage in plants/algae etc.; generate genetic variation in a crop of interest; affect fruit-ripening; increasing storage life of plants/algae etc.; reducing allergen in plants/algae etc.; ensure a value added trait (e.g. nutritional improvement); Screening methods for endogenous genes of interest; biofuel, fatty acid, organic acid, etc. production.

[0682] The CRISPR systems provided herein can be used to introduce targeted double-strand or single-strand breaks and/or to introduce gene activator and or repressor systems and without being limitative, can be used for gene targeting, gene replacement, targeted mutagenesis, targeted deletions or insertions, targeted inversions and/or targeted translocations. By co-expression of multiple targeting RNAs directed to achieve multiple modifications in a single cell, multiplexed genome modification can be ensured. This technology can be used to high-precision engineering of plants with improved characteristics, including enhanced nutritional quality, increased resistance to diseases and resistance to biotic and abiotic stress, and increased production of commercially valuable plant products or heterologous compounds.

### Chloroplast Targeting

[0683] In particular embodiments, the CRISPR-Cas system is used to specifically modify chloroplast genes or to ensure expression in the chloroplast. For this purpose, use is made of chloroplast transformation methods or compartmentalization of the CRISPR-Cas components to the chloroplast. For instance, the introduction of genetic modifications in the plastid genome can reduce biosafety issues such as gene flow through pollen.

[0684] Methods of chloroplast transformation are known in the art and include Particle bombardment, PEG treatment, and microinjection. Additionally, methods involving the translocation of transformation cassettes from the nuclear genome to the plastid can be used as described in WO2010061186.

[0685] Alternatively, it is envisaged to target one or more of the CRISPR-Cas components to the plant chloroplast. This is achieved by incorporating in the expression construct a sequence encoding a chloroplast transit peptide (CTP) or plastid transit peptide, operably linked to the 5′ region of the sequence encoding the CRISPR-Cas protein. The CTP is removed in a processing step during translocation into the chloroplast. Chloroplast targeting of expressed proteins is well known to the skilled artisan (see for instance Protein Transport into Chloroplasts, 2010, Annual Review of Plant Biology, Vol. 61: 157-180). In such embodiments it is also desired to target the guide RNA to the plant chloroplast. Methods and constructs which can be used for translocating guide RNA into the chloroplast by means of a chloroplast localization sequence are described, for instance, in US 20040142476, incorporated herein by reference. Such variations of constructs can be incorporated into the expression systems of the invention to efficiently translocate the CRISPR-Cas-guide RNA.

### Introduction of Polynucleotides in Algal Cells

[0686] Transgenic algae (or other plants such as rape) may be particularly useful in the production of vegetable oils or biofuels such as alcohols (especially methanol and ethanol) or other products. These may be engineered to express or overexpress high levels of oil or alcohols for use in the oil or biofuel industries.

[0687] U.S. Pat. No. 8,945,839 describes a method for engineering Micro-Algae (Chlamydomonas reinhardtii cells) species) using Cas9. Using similar tools, the methods of the CRISPR-Cas system described herein can be applied on Chlamydomonas species and other algae. In particular embodiments, Cas protein(s) (e.g., a small Type II-D Cas protein or variant thereof) and guide RNA are introduced in algae expressed using a vector that expresses Cas protein(s) (e.g., a small Type II-D Cas protein or variant thereof) under the control of a constitutive promoter such as Hsp70A-Rbc S2 or Beta2-tubulin. Guide RNA is optionally delivered using a vector containing T7 promoter. In some embodiments, a Cas protein(s) (e.g., a small Type II-D Cas protein or variant thereof) mRNA and in vitro transcribed guide RNA can be delivered to algal cells. Electroporation protocols are available to the skilled person such as the standard recommended protocol from the GeneArt Chlamydomonas Engineering kit.

[0688] In particular embodiments, the endonuclease used herein is a Split Cas (e.g., a split small Type II-D Cas protein or variant thereof) enzyme. Split Cas (e.g., a split small Type II-D Cas protein or variant thereof) enzymes are preferentially used in Algae for targeted genome modification similar to that which has been described for Cas9 in International Patent Publication No. WO 2015086795. Use of the Cas (e.g., a small Type II-D Cas protein or variant thereof) split system is particularly suitable for an inducible method of genome targeting and avoids the potential toxic effect of the Cas overexpression within the algae cell. In particular embodiments, a Cas (e.g., a small Type II-D Cas protein or variant thereof) proteins split domains (RuvC (inactive or active) and/or HNH domains and/or other catalytic domains) can be simultaneously or sequentially introduced into the cell such that said split Cas (e.g., a small Type II-D Cas protein or variant thereof) domain(s) process the target nucleic acid sequence in the algae or other cell. The reduced size of the split Cas (e.g., a small Type II-D Cas protein or variant thereof) protein compared to the wild type Cas (e.g., a small Type II-D Cas protein or variant thereof) protein allows other methods of delivery of the CRISPR system to the cells, such as the use of Cell Penetrating Peptides as described elsewhere herein. This method is of particular interest for generating genetically modified algae.

### Modifying Algae and Plants for Production of Vegetable Oils or Biofuels

[0689] Transgenic algae or other plants such as rape may be particularly useful in the production of vegetable oils or biofuels such as alcohols (especially methanol and ethanol), for instance. These may be engineered to express or overexpress high levels of oil or alcohols for use in the oil or biofuel industries. The term “biofuel” as used herein is an alternative fuel made from plant and plant-derived resources. Renewable biofuels can be extracted from organic matter whose energy has been obtained through a process of carbon fixation or are made through the use or conversion of biomass. This biomass can be used directly for biofuels or can be converted to convenient energy containing substances by thermal conversion, chemical conversion, and biochemical conversion. This biomass conversion can result in fuel in solid, liquid, or gas form. There are two types of biofuels: bioethanol and biodiesel. Bioethanol is mainly produced by the sugar fermentation process of cellulose (starch), which is mostly derived from maize and sugar cane. Biodiesel on the other hand is mainly produced from oil crops such as rapeseed, palm, and soybean. Biofuels are used mainly for transportation. In some embodiments, the CRISPR-Cas system is used to generate lipid-rich diatoms which are useful in biofuel production.

[0690] In some embodiments, genes that are involved in the modification of the quantity of lipids and/or the quality of the lipids produced by the algal cell are specifically modified. Examples of genes encoding enzymes involved in the pathways of fatty acid synthesis can encode proteins having for instance acetyl-CoA carboxylase, fatty acid synthase, 3-ketoacyl_acyl-carrier protein synthase III, glycerol-3-phosphate dehydrogenase (G3PDH), Enoyl-acyl carrier protein reductase (Enoyl-ACP-reductase), glycerol-3-phosphate acyltransferase, lysophosphatidic acyl transferase or diacylglycerol acyltransferase, phospholipid:diacylglycerol acyltransferase, phosphatidate phosphatase, fatty acid thioesterase such as palmitoyl protein thioesterase, or malic enzyme activities. In further embodiments it is envisaged to generate diatoms that have increased lipid accumulation. This can be achieved by targeting genes that decrease lipid categorization. Of particular interest for use in the methods of the present invention are genes involved in the activation of both triacylglycerol and free fatty acids, as well as genes directly involved in β-oxidation of fatty acids, such as acyl-CoA synthetase, 3-ketoacyl-CoA thiolase, acyl-CoA oxidase activity and phosphoglucomutase. The CRISPR-Cas system and methods described herein can be used to specifically activate such genes in diatoms as to increase their lipid content.

[0691] Organisms such as microalgae are widely used for synthetic biology. Stovicek et al. (Metab. Eng. Comm., 2015; 2:13 describes genome editing of industrial yeast, for example, Saccharomyces cerevisiae, to efficiently produce robust strains for industrial production. Stovicek used a CRISPR-Cas9 system codon-optimized for yeast to simultaneously disrupt both alleles of an endogenous gene and knock in a heterologous gene. Cas9 and gRNA were expressed from genomic or episomal 2μ-based vector locations. The authors also showed that gene disruption efficiency could be improved by optimization of the levels of Cas9 and gRNA expression. Hlavová et al. (Biotechnol. Adv. 2015) discusses development of species or strains of microalgae using techniques such as CRISPR to target nuclear and chloroplast genes for insertional mutagenesis and screening. The methods of Stovicek and Hlavová may be applied and/or adapted to the Cas (e.g., a small Type II-D Cas protein or variant thereof) effector protein system of the present invention.

[0692] U.S. Pat. No. 8,945,839 describes a method for engineering Micro-Algae (Chlamydomonas reinhardtii cells) species) using Cas9. Using similar tools, the methods of the CRISPR-Cas system described herein can be applied on Chlamydomonas species and other algae. In particular embodiments, Cas (e.g., a small Type II-D Cas protein or variant thereof) protein(s) and guide RNA are introduced in algae expressed using a vector that expresses the Cas (e.g., a small Type II-D Cas protein or variant thereof) protein(s) under the control of a constitutive promoter such as Hsp70A-Rbc S2 or Beta2-tubulin. Guide RNA will be delivered using a vector containing T7 promoter. Alternatively, Cas (e.g., a small Type II-D Cas protein or variant thereof) mRNA(s) and in vitro transcribed guide RNA can be delivered to algal cells. Electroporation protocol follows standard recommended protocol from the GeneArt Chlamydomonas Engineering kit

[0693] In particular embodiments, the methods using the CRISPR-Cas system as described herein are used to alter the properties of the cell wall in order to facilitate access by key hydrolyzing agents for a more efficient release of sugars for fermentation. In particular embodiments, the biosynthesis of cellulose and/or lignin are modified. Cellulose is the major component of the cell wall. The biosynthesis of cellulose and lignin are co-regulated. By reducing the proportion of lignin in a plant the proportion of cellulose can be increased. In particular embodiments, the methods described herein are used to downregulate lignin biosynthesis in the plant so as to increase fermentable carbohydrates. More particularly, the methods described herein are used to downregulate at least a first lignin biosynthesis gene selected from the group consisting of 4-coumarate 3-hydroxylase (C3H), phenylalanine ammonia-lyase (PAL), cinnamate 4-hydroxylase (C4H), hydroxycinnamoyl transferase (HCT), caffeic acid O-methyltransferase (COMT), caffeoyl CoA 3-O-methyltransferase (CCoAOMT), ferulate 5-hydroxylase (F5H), cinnamyl alcohol dehydrogenase (CAD), cinnamoyl CoA-reductase (CCR), 4-coumarate-CoA ligase (4CL), monolignol-lignin-specific glycosyltransferase, and aldehyde dehydrogenase (ALDH) as disclosed in WO 2008064289 A2.

[0694] In particular embodiments, the methods described herein are used to produce plant mass that produces lower levels of acetic acid during fermentation (see also WO 2010096488). More particularly, the methods disclosed herein are used to generate mutations in homologs to CaslL to reduce polysaccharide acetylation.

### Transient Expression of CRISPR-Cas Systems and Components in Plant Cells

[0695] In particular embodiments, it is envisaged that the guide RNA and/or Cas (e.g., a small Type II-D Cas protein or variant thereof) gene are transiently expressed in the plant cell. In these embodiments, the CRISPR-Cas system can ensure modification of a target gene only when both the guide RNA and the Cas (e.g., a small Type II-D Cas protein or variant thereof) protein(s) is/are present in a cell, such that genomic modification can further be controlled. As the expression of the Cas (e.g., a small Type II-D Cas protein or variant thereof) protein(s) is transient, plants regenerated from such plant cells typic Cas (e.g., a small Type II-D Cas protein or variant thereof) protein(s) is stably expressed by the plant cell and the guide sequence is transiently expressed.

[0696] In particular embodiments, the CRISPR-Cas system components can be introduced in the plant cells using a plant viral vector (Scholthof et al. 1996, Annu Rev Phytopathol. 1996; 34:299-323). In further particular embodiments, said viral vector is a vector from a DNA virus. For example, geminivirus (e.g., cabbage leaf curl virus, bean yellow dwarf virus, wheat dwarf virus, tomato leaf curl virus, maize streak virus, tobacco leaf curl virus, or tomato golden mosaic virus) or nanovirus (e.g., Faba bean necrotic yellow virus). In other particular embodiments, said viral vector is a vector from an RNA virus. For example, tobravirus (e.g., tobacco rattle virus, tobacco mosaic virus), potexvirus (e.g., potato virus X), or hordeivirus (e.g., barley stripe mosaic virus). The replicating genomes of plant viruses are non-integrative vectors.

[0697] In particular embodiments, the vector used for transient expression of CRISPR-Cas constructs is for instance a pEAQ vector, which is tailored for Agrobacterium-mediated transient expression (Sainsbury F. et al., Plant Biotechnol. J. 2009 September; 7(7):682-93) in the protoplast. Precise targeting of genomic locations was demonstrated using a modified Cabbage Leaf Curl virus (CaLCuV) vector to express gRNAs in stable transgenic plants expressing a CRISPR enzyme (Scientific Reports 5, Article number: 14926 (2015), doi:10.1038/srep14926).

[0698] In particular embodiments, double-stranded DNA fragments encoding the guide RNA and/or the Cas (e.g., a small Type II-D Cas protein or variant thereof) gene(s) can be transiently introduced into the plant cell. In such embodiments, the introduced double-stranded DNA fragments are provided in sufficient quantity to modify the cell but do not persist after a contemplated period of time has passed or after one or more cell divisions. Methods for direct DNA transfer in plants are known by the skilled artisan (see for instance Davey et al. Plant Mol Biol. 1989 September; 13(3):273-85.)

[0699] In other embodiments, an RNA polynucleotide encoding the Cas (e.g., a small Type II-D Cas protein or variant thereof) protein(s) is/are introduced into the plant cell, which is then translated and processed by the host cell generating the protein in sufficient quantity to modify the cell (in the presence of at least one guide RNA) but which does not persist after a contemplated period of time has passed or after one or more cell divisions. Methods for introducing mRNA to plant protoplasts for transient expression are known by the skilled artisan (see for instance in Gallie, Plant Cell Reports (1993), 13; 119-122).

[0700] Combinations of the different methods described above are also envisaged.

### Detecting Modifications in the Plant Genome—Selectable Markers

[0701] In particular embodiments, where the method involves modification of an endogenous target gene of the plant genome, any suitable method can be used to determine, after the plant, plant part or plant cell is infected or transfected with the CRISPR-Cas system, whether gene targeting or targeted mutagenesis has occurred at the target site. Where the method involves introduction of a transgene, a transformed plant cell, callus, tissue or plant may be identified and isolated by selecting or screening the engineered plant material for the presence of the transgene or for traits encoded by the transgene. Physical and biochemical methods may be used to identify plant or plant cell transformants containing inserted gene constructs or an endogenous DNA modification. These methods include but are not limited to: 1) Southern analysis or PCR amplification for detecting and determining the structure of the recombinant DNA insert or modified endogenous genes; 2) Northern blot, S1 RNase protection, primer-extension or reverse transcriptase-PCR amplification for detecting and examining RNA transcripts of the gene constructs; 3) enzymatic assays for detecting enzyme or ribozyme activity, where such gene products are encoded by the gene construct or expression is affected by the genetic modification; 4) protein gel electrophoresis, Western blot techniques, immunoprecipitation, or enzyme-linked immunoassays, where the gene construct or endogenous gene products are proteins. Additional techniques, such as in situ hybridization, enzyme staining, and immunostaining, also may be used to detect the presence or expression of the recombinant construct or detect a modification of endogenous gene in specific plant organs and tissues. The methods for doing all these assays are well known to those skilled in the art.

[0702] Additionally (or alternatively), the expression system encoding the CRISPR-Cas components is typically designed to comprise one or more selectable or detectable markers that provide a means to isolate or efficiently select cells that contain and/or have been modified by the CRISPR-Cas system at an early stage and on a large scale.

[0703] In the case of Agrobacterium-mediated transformation, the marker cassette may be adjacent to or between flanking T-DNA borders and contained within a binary vector. In another embodiment, the marker cassette may be outside of the T-DNA. A selectable marker cassette may also be within or adjacent to the same T-DNA borders as the expression cassette or may be somewhere else within a second T-DNA on the binary vector (e.g., a 2 T-DNA system).

[0704] For particle bombardment or with protoplast transformation, the expression system can comprise one or more isolated linear fragments or may be part of a larger construct that might contain bacterial replication elements, bacterial selectable markers or other detectable elements. The expression cassette(s) comprising the polynucleotides encoding the guide and/or Cas (e.g., a small Type II-D Cas protein or variant thereof) proteins may be physically linked to a marker cassette or may be mixed with a second nucleic acid molecule encoding a marker cassette. The marker cassette is comprised of necessary elements to express a detectable or selectable marker that allows for efficient selection of transformed cells.

[0705] The selection procedure for the cells based on the selectable marker will depend on the nature of the marker gene. In particular embodiments, use is made of a selectable marker, i.e. a marker which allows a direct selection of the cells based on the expression of the marker. A selectable marker can confer positive or negative selection and is conditional or non-conditional on the presence of external substrates (Miki et al. 2004, 107(3): 193-232). Most commonly, antibiotic or herbicide resistance genes are used as a marker, whereby selection is be performed by growing the engineered plant material on media containing an inhibitory amount of the antibiotic or herbicide to which the marker gene confers resistance. Examples of such genes are genes that confer resistance to antibiotics, such as hygromycin (hpt) and kanamycin (nptII), and genes that confer resistance to herbicides, such as phosphinothricin (bar) and chlorosulfuron (als).

[0706] Transformed plants and plant cells may also be identified by screening for the activities of a visible marker, typically an enzyme capable of processing a colored substrate (e.g., the β-glucuronidase, luciferase, B or C1 genes). Such selection and screening methodologies are well known to those skilled in the art.

### Plant Cultures and Regeneration

[0707] In particular embodiments, plant cells which have a modified genome and that are produced or obtained by any of the methods described herein, can be cultured to regenerate a whole plant which possesses the transformed or modified genotype and thus the desired phenotype. Conventional regeneration techniques are well known to those skilled in the art. Particular examples of such regeneration techniques rely on manipulation of certain phytohormones in a tissue culture growth medium, and typically relying on a biocide and/or herbicide marker which has been introduced together with the desired nucleotide sequences. In further particular embodiments, plant regeneration is obtained from cultured protoplasts, plant callus, explants, organs, pollens, embryos or parts thereof (see e.g., Evans et al. (1983), Handbook of Plant Cell Culture, Klee et al (1987) Ann. Rev. of Plant Phys.).

[0708] In particular embodiments, transformed or improved plants as described herein can be self-pollinated to provide seed for homozygous improved plants of the invention (homozygous for the DNA modification) or crossed with non-transgenic plants or different improved plants to provide seed for heterozygous plants. Where a recombinant DNA was introduced into the plant cell, the resulting plant of such a crossing is a plant which is heterozygous for the recombinant DNA molecule. Both such homozygous and heterozygous plants obtained by crossing from the improved plants and comprising the genetic modification (which can be a recombinant DNA) are referred to herein as “progeny”. Progeny plants are plants descended from the original transgenic plant and containing the genome modification or recombinant DNA molecule introduced by the methods provided herein. Alternatively, genetically modified plants can be obtained by one of the methods described supra using the Cfp1 enzyme whereby no foreign DNA is incorporated into the genome. Progeny of such plants obtained by further breeding may also contain the genetic modification. Breedings are performed by any breeding methods that are commonly used for different crops (e.g., Allard, Principles of Plant Breeding, John Wiley & Sons, NY, U. of CA, Davis, CA, 50-98 (1960).

Generation of Plants with Enhanced Agronomic Traits

[0709] The CRISPR systems provided herein can be used to introduce targeted double-strand or single-strand breaks and/or to introduce gene activator and or repressor systems and without being limitative, can be used for gene targeting, gene replacement, targeted mutagenesis, targeted deletions or insertions, targeted inversions and/or targeted translocations. By co-expression of multiple targeting RNAs directed to achieve multiple modifications in a single cell, multiplexed genome modification can be ensured. This technology can be used to high-precision engineering of plants with improved characteristics, including enhanced nutritional quality, increased resistance to diseases and resistance to biotic and abiotic stress, and increased production of commercially valuable plant products or heterologous compounds.

[0710] In particular embodiments, the CRISPR-Cas system as described herein is used to introduce targeted double-strand breaks (DSB) in an endogenous DNA sequence. The DSB activates cellular DNA repair pathways, which can be harnessed to achieve desired DNA sequence modifications near the break site. This is of interest where the inactivation of endogenous genes can confer or contribute to a desired trait. In particular embodiments, homologous recombination with a template sequence is promoted at the site of the DSB, in order to introduce a gene of interest.

[0711] In particular embodiments, the CRISPR-Cas system may be used as a generic nucleic acid binding protein with fusion to or being operably linked to a functional domain for activation and/or repression of endogenous plant genes. Exemplary functional domains may include but are not limited to translational initiator, translational activator, translational repressor, nucleases, in particular ribonucleases, a spliceosome, beads, a light inducible/controllable domain or a chemically inducible/controllable domain. Typically, in these embodiments, the Cas (e.g., a small Type II-D Cas protein or variant thereof) protein(s) comprises at least one mutation, such that it has no more than 5% of the activity of the Cas (e.g., a small Type II-D Cas protein or variant thereof) protein(s) not having the at least one mutation; the guide RNA comprises a guide sequence capable of hybridizing to a target sequence.

[0712] The methods described herein generally result in the generation of “improved plants” in that they have one or more desirable traits compared to the wildtype plant. In particular embodiments, the plants, plant cells or plant parts obtained are transgenic plants, comprising an exogenous DNA sequence incorporated into the genome of all or part of the cells of the plant. In particular embodiments, non-transgenic genetically modified plants, plant parts or cells are obtained, in that no exogenous DNA sequence is incorporated into the genome of any of the plant cells of the plant. In such embodiments, the improved plants are non-transgenic. Where only the modification of an endogenous gene is ensured and no foreign genes are introduced or maintained in the plant genome, the resulting genetically modified crops contain no foreign genes and can thus basically be considered non-transgenic. The different applications of the CRISPR-Cas system for plant genome editing are described more in detail below.

[0713] In further particular embodiments, crop plants can be improved by influencing specific plant traits. For example, by developing pesticide-resistant plants, improving disease resistance in plants, improving plant insect and nematode resistance, improving plant resistance against parasitic weeds, improving plant drought tolerance, improving plant nutritional value, improving plant stress tolerance, avoiding self-pollination, plant forage digestibility biomass, grain yield etc. A few specific non-limiting examples are provided hereinbelow.

[0714] In addition to targeted mutation of single genes, CRISPR complexes can be designed to allow targeted mutation of multiple genes, deletion of chromosomal fragment, site-specific integration of transgene, site-directed mutagenesis in vivo, and precise gene replacement or allele swapping in plants. Therefore, the methods described herein have broad applications in gene discovery and validation, mutational and cisgenic breeding, and hybrid breeding. These applications facilitate the production of a new generation of genetically modified crops with various improved agronomic traits such as herbicide resistance, disease resistance, abiotic stress tolerance, high yield, and superior quality.

### Introduction of One or More Foreign Genes to Confer an Agricultural Trait of Interest

[0715] The invention provides methods of genome editing or modifying sequences associated with or at a target locus of interest wherein the method comprises introducing a Cas (e.g., a small Type II-D Cas protein or variant thereof) effector protein complex(es) into a plant cell, whereby the Cas (e.g., a small Type II-D Cas protein or variant thereof) effector protein complex(es) effectively functions to integrate a DNA insert, e.g., encoding a foreign gene of interest, into the genome of the plant cell. In some embodiments the integration of the DNA insert is facilitated by HR with an exogenously introduced DNA template or repair template. Typically, the exogenously introduced DNA template or repair template is delivered together with the Cas (e.g., a small Type II-D Cas protein or variant thereof) effector protein complex(es) or one component or a polynucleotide vector for expression of a component of the complex(es).

[0716] The CRISPR-Cas systems provided herein allow for targeted gene delivery. It has become increasingly clear that the efficiency of expressing a gene of interest is to a great extent determined by the location of integration into the genome. The present methods allow for targeted integration of the foreign gene into a desired location in the genome. The location can be selected based on information of previously generated events or can be selected by methods disclosed elsewhere herein.

[0717] In particular embodiments, the methods provided herein include (a) introducing into the cell a CRISPR-Cas complex comprising a guide RNA, comprising a direct repeat and a guide sequence, wherein the guide sequence hybridizes to a target sequence that is endogenous to the plant cell; (b) introducing into the plant cell a Cas (e.g., a small Type II-D Cas protein or variant thereof) effector molecule(s), which complexes with the guide RNA when the guide sequence hybridizes to the target sequence and induces a double strand break at or near the sequence to which the guide sequence is targeted; and (c) introducing into the cell a nucleotide sequence encoding an HDR repair template and/or donor/insert polynucleotide which encodes the gene of interest and which is introduced into the location of the DS break as a result of HDR or other repair or other mechanism as described in greater detail elsewhere herein. In particular embodiments, the step of introducing can include delivering to the plant cell one or more polynucleotides encoding Cas (e.g., a small Type II-D Cas protein or variant thereof) effector protein(s), the guide RNA and the repair template and/or donor/insert polynucleotide. In particular embodiments, the polynucleotides are delivered into the cell by a DNA virus (e.g., a geminivirus) or an RNA virus (e.g., a tobravirus). In particular embodiments, the introducing steps include delivering to the plant cell a T-DNA containing one or more polynucleotide sequences encoding the Cas (e.g., a small Type II-D Cas protein or variant thereof) effector protein(s) the guide RNA and the repair template, where the delivering is via Agrobacterium. The nucleic acid sequence encoding the Cas (e.g. a small Type II-D Cas protein or variant thereof) effector protein(s) can be operably linked to a promoter, such as a constitutive promoter (e.g., a cauliflower mosaic virus 35S promoter), or a cell specific or inducible promoter. In particular embodiments, the polynucleotide is introduced by microprojectile bombardment. In particular embodiments, the method further includes screening the plant cell after the introducing steps to determine whether the repair template i.e., the gene of interest has been introduced. In particular embodiments, the methods include the step of regenerating a plant from the plant cell. In further embodiments, the methods include cross breeding the plant to obtain a genetically desired plant lineage. Examples of foreign genes encoding a trait of interest are listed below.

### Editing of Endogenous Genes to Confer an Agricultural Trait of Interest

[0718] The invention provides methods of genome editing or modifying sequences associated with or at a target locus of interest wherein the method comprises introducing one or more Cas (e.g., a small Type II-D Cas protein or variant thereof) effector protein complex(es) into a plant cell, whereby the Cas (e.g., a small Type II-D Cas protein or variant thereof) complex(es) modifies the expression of an endogenous gene of the plant. This can be achieved in different ways. In particular embodiments, the elimination of expression of an endogenous gene is desirable and the CRISPR-Cas complex is used to target and cleave an endogenous gene so as to modify gene expression. In these embodiments, the methods provided herein include (a) introducing into the plant cell a CRISPR-Cas complex comprising a guide RNA, comprising a direct repeat and a guide sequence, wherein the guide sequence hybridizes to a target sequence within a gene of interest in the genome of the plant cell; and (b) introducing into the cell a Cas (e.g., a small Type II-D Cas protein or variant thereof) effector protein(s), which upon binding to the guide RNA comprises a guide sequence that is hybridized to the target sequence, ensures a double strand break at or near the sequence to which the guide sequence is targeted; In particular embodiments, the step of introducing can include delivering to the plant cell one or more polynucleotides encoding Cas (e.g., a small Type II-D Cas protein or variant thereof) effector protein(s) and the guide RNA.

[0719] In particular embodiments, the polynucleotides are delivered into the cell by a DNA virus (e.g., a geminivirus) or an RNA virus (e.g., a tobravirus). In particular embodiments, the introducing steps include delivering to the plant cell a T-DNA containing one or more polynucleotide sequences encoding the Cas (e.g., a small Type II-D Cas protein or variant thereof) effector protein (s) and the guide RNA, where the delivering is via Agrobacterium. The polynucleotide sequence encoding the components of the CRISPR-Cas system can be operably linked to a promoter, such as a constitutive promoter (e.g., a cauliflower mosaic virus 35S promoter), or a cell specific or inducible promoter. In particular embodiments, the polynucleotide is introduced by microprojectile bombardment. In particular embodiments, the method further includes screening the plant cell after the introducing steps to determine whether the expression of the gene of interest has been modified. In particular embodiments, the methods include the step of regenerating a plant from the plant cell. In further embodiments, the methods include cross breeding the plant to obtain a genetically desired plant lineage.

[0720] In particular embodiments of the methods described above, disease resistant crops are obtained by targeted mutation of disease susceptibility genes or genes encoding negative regulators (e.g. Mlo gene) of plant defense genes. In a particular embodiment, herbicide-tolerant crops are generated by targeted substitution of specific nucleotides in plant genes such as those encoding acetolactate synthase (ALS) and protoporphyrinogen oxidase (PPO). In particular embodiments drought and salt tolerant crops by targeted mutation of genes encoding negative regulators of abiotic stress tolerance, low amylose grains by targeted mutation of Waxy gene, rice or other grains with reduced rancidity by targeted mutation of major lipase genes in aleurone layer, etc. In particular embodiments. A more extensive list of endogenous genes encoding a traits of interest are listed below.

### Modulating of Endogenous Genes by the CRISPR-Cas System to Confer an Agricultural Trait of Interest

[0721] Also provided herein are methods for modulating (i.e., activating or repressing) endogenous gene expression using the Cas (e.g., a small Type II-D Cas protein or variant thereof) protein(s) provided herein. Such methods make use of distinct RNA sequence(s) which are targeted to the plant genome by the Cas (e.g., a small Type II-D Cas protein or variant thereof) complex(es). More particularly the distinct RNA sequence(s) bind to two or more adaptor proteins (e.g. aptamers) whereby each adaptor protein is associated with one or more functional domains and wherein at least one of the one or more functional domains associated with the adaptor protein have one or more activities comprising methylase activity, demethylase activity, transcription activation activity, transcription repression activity, transcription release factor activity, histone modification activity, DNA integration activity RNA cleavage activity, DNA cleavage activity or nucleic acid binding activity; The functional domains are used to modulate expression of an endogenous plant gene so as to obtain the desired trait. Typically, in these embodiments, the Cas (e.g., a small Type II-D Cas protein or variant thereof) effector protein(s) has one or more mutations such that it has no more than 5% of the nuclease activity of the Cas (e.g., a small Type II-D Cas protein or variant thereof) effector protein(s) not having the at least one mutation.

[0722] In particular embodiments, the methods provided herein include the steps of (a) introducing into the cell a CRISPR-Cas complex comprising a guide RNA, comprising a direct repeat and a guide sequence, wherein the guide sequence hybridizes to a target sequence that is endogenous to the plant cell; (b) introducing into the plant cell a Cas (e.g. a small Type II-D Cas protein or variant thereof) effector molecule(s) which complexes with the guide RNA when the guide sequence hybridizes to the target sequence; and wherein either the guide RNA is modified to comprise a distinct RNA sequence (aptamer) binding to a functional domain and/or the Cas (e.g. a small Type II-D Cas protein or variant thereof) effector protein(s) is modified in that it is linked to a functional domain. In particular embodiments, the step of introducing can include delivering to the plant cell one or more polynucleotides encoding the (modified) Cas (e.g., a small Type II-D Cas protein or variant thereof) effector protein(s) and the (modified) guide RNA. The details the components of the CRISPR-Cas system for use in these methods are described elsewhere herein.

[0723] In particular embodiments, the polynucleotides are delivered into the cell by a DNA virus (e.g., a geminivirus) or an RNA virus (e.g., a tobravirus). In particular embodiments, the introducing steps include delivering to the plant cell a T-DNA containing one or more polynucleotide sequences encoding the Cas (e.g., a small Type II-D Cas protein or variant thereof) effector protein (s) and the guide RNA, where the delivering is via Agrobacterium. The nucleic acid sequence encoding the one or more components of the CRISPR-Cas system can be operably linked to a promoter, such as a constitutive promoter (e.g., a cauliflower mosaic virus 35S promoter), or a cell specific or inducible promoter. In particular embodiments, the polynucleotide is introduced by microprojectile bombardment. In particular embodiments, the method further includes screening the plant cell after the introducing steps to determine whether the expression of the gene of interest has been modified. In particular embodiments, the methods include the step of regenerating a plant from the plant cell. In further embodiments, the methods include cross breeding the plant to obtain a genetically desired plant lineage. A more extensive list of endogenous genes encoding a traits of interest are listed below.

[0724] The CRISPR-Cas systems described here can be used to modify polyploid plants. Many plants are polyploid, which means they carry duplicate copies of their genomes-sometimes as many as six, as in wheat. The methods according to the present invention, which make use of the CRISPR-Cas effector protein can be “multiplexed” to affect all copies of a gene, or to target dozens of genes at once. For instance, in particular embodiments, the methods of the present invention are used to simultaneously ensure a loss of function mutation in different genes responsible for suppressing defenses against a disease. In particular embodiments, the methods of the present invention are used to simultaneously suppress the expression of the TaMLO-A1, TaMLO-Bl and TaMLO-Dl nucleic acid sequence in a wheat plant cell and regenerating a wheat plant therefrom, in order to ensure that the wheat plant is resistant to powdery mildew (see also WO2015109752).

[0725] Described herein are exemplary genes conferring agronomic traits. As described herein above, in particular embodiments, the invention encompasses the use of the CRISPR-Cas system as described herein for the insertion of a DNA of interest, including one or more plant expressible gene(s). In further particular embodiments, the invention encompasses methods and tools using the CRISPR-Cas system as described herein for partial or complete deletion of one or more plant expressed gene(s). In other further particular embodiments, the invention encompasses methods and tools using the CRISPR-Cas system as described herein to ensure modification of one or more plant-expressed genes by mutation, substitution, insertion of one of more nucleotides. In other particular embodiments, the invention encompasses the use of CRISPR-Cas system as described herein to ensure modification of expression of one or more plant-expressed genes by specific modification of one or more of the regulatory elements directing expression of said genes.

[0726] In particular embodiments, the invention encompasses methods which involve the introduction of exogenous genes and/or the targeting of endogenous genes and their regulatory elements, including but not limited to any of those further described below.

[0727] Genes that Confer Resistance to Pests or Diseases

[0728] In some embodiments, the modified plant or cell thereof can be modified to contain a gene or gene variant that can confer disease resistance to the plant or cell thereof. In some embodiments, an exogenous gene is introduced. In other embodiments, an endogenous gene can be modified to a disease-resistant variant of the endogenous gene. A plant can be transformed with cloned resistance genes to engineer plants that are resistant to specific pathogen strains. See, e.g., Jones et al., Science 266:789 (1994) (cloning of the tomato Cf-9 gene for resistance to Cladosporium fulvum); Martin et al., Science 262:1432 (1993) (tomato Pto gene for resistance to Pseudomonas syringae pv. tomato encodes a protein kinase); Mindrinos et al., Cell 78:1089 (1994) (Arabidopsis may be RSP2 gene for resistance to Pseudomonas syringae). A plant gene that is upregulated or down regulated during pathogen infection can be engineered for pathogen resistance. See, e.g., Thomazella et al., bioRxiv 064824; doi: https://doi.org/10.1101/064824 Epub. Jul. 23, 2016 (tomato plants with deletions in the SlDMR6-1 which is normally upregulated during pathogen infection). In some embodiments, the modified plant can be modified to express a gene that is resistant to specific pathogens by the CRISPR-Cas systems described herein.

[0729] In some embodiments, the modified plant can be modified to express one or more genes conferring resistance to a pest, such as soybean cyst nematode. See e.g., PCT Application WO 96/30517; PCT Application WO 93/19181.

[0730] In some embodiments, the modified plant can be modified with one or more genes whose gene products can repel, deter, and/or kill a plant pest (e.g. insect, animal, or other organism that is detrimental to the plant or another plant (e.g. in the case of a trap crop)). In some embodiments, such genes can be Bacillus thuringiensis proteins' genes, (see, e.g., Geiser et al., Gene 48:109 (1986)); lectins' gene(s) (see e.g. Van Damme et al., Plant Molec. Biol. 24:25 (1994); a vitamin-binding protein gene (e.g. avidin or avidin homologue) (see e.g., PCT application US93/06487), genes encoding enzyme inhibitors (e.g. protease or proteinase inhibitors and amylase inhibitors) (see e.g., Abe et al., J. Biol. Chem. 262:16793 (1987), Huub et al., Plant Molec. Biol. 21:985 (1993)), Sumitani et al., Biosci. Biotech. Biochem. 57:1243 (1993) and U.S. Pat. No. 5,494,813); insect-specific hormones or pheromones (e.g. ecdysteroid or juvenile hormone, a variant thereof, a mimetic based thereon, or an antagonist or agonist thereof) (see e.g. Hammock et al., Nature 344:458 (1990)); genes encoding insect-specific peptides which, upon expression, disrupts the physiology of the affected pest (see e.g. Regan, J. Biol. Chem. 269:9 (1994) and Pratt et al., Biochem. Biophys. Res. Comm. 163:1243 (1989). See also U.S. Pat. No. 5,266,317); genes encoding insect-specific venom or proteins thereof produced by a snake, a wasp, or any other organism (see e.g., Pang et al., Gene 116: 165 (1992)); genes encoding enzymes responsible for a hyperaccumulation of a monoterpene, a sesquiterpene, a steroid, hydroxamic acid, a phenylpropanoid derivative, or another nonprotein molecule with insecticidal activity; Enzymes involved in the modification, including the post-translational modification, of a biologically active molecule; for example, a glycolytic enzyme, a proteolytic enzyme, a lipolytic enzyme, a nuclease, a cyclase, a transaminase, an esterase, a hydrolase, a phosphatase, a kinase, a phosphorylase, a polymerase, an elastase, a chitinase and a glucanase, whether natural or synthetic (see e.g., PCT application WO93/02197, Kramer et al., Insect Biochem. Molec. Biol. 23:691 (1993) and Kawalleck et al., Plant Molec. Biol. 21:673 (1993)); genes encoding molecules that can stimulate signal transduction (see e.g., Botella et al., Plant Molec. Biol. 24:757 (1994), and Griess et al., Plant Physiol. 104:1467 (1994)); gene(s) encoding viral-invasive proteins or a complex toxin derived therefrom (Beachy et al., Ann. rev. Phytopathol. 28:451 (1990)); gene(s) encoding developmental-arrestive proteins produced in nature by a pathogen or a parasite see e.g., Lamb et al., Bio/Technology 10:1436 (1992) and Toubart et al., Plant J. 2:367 (1992)); gene(s) encoding a developmental-arrestive protein produced in nature by a plant (see e.g., Logemann et al., Bio/Technology 10:305 (1992)) and combinations thereof.

[0731] In plants, pathogens are often host-specific. For example, some Fusarium species will cause tomato wilt but attacks only tomato, and other Fusarium species attack only wheat. Plants have existing and induced defenses to resist most pathogens. Mutations and recombination events across plant generations lead to genetic variability that gives rise to susceptibility, especially as pathogens reproduce with more frequency than plants. In plants there can be non-host resistance, e.g., the host and pathogen are incompatible or there can be partial resistance against all races of a pathogen, typically controlled by many genes and/or also complete resistance to some races of a pathogen but not to other races. Such resistance is typically controlled by a few genes. Using methods and components of the CRISPR-Cas system, a new tool now exists to induce specific mutations in anticipation hereon. Accordingly, one can analyze the genome of sources of resistance genes, and in plants having desired characteristics or traits, use the method and components of the CRISPR-Cas system to induce the rise of resistance genes. The present systems can do so with more precision than previous mutagenic agents and hence accelerate and improve plant breeding programs.

[0732] In some embodiments, the plant or cell(s) thereof can be modified to contain one or more genes involved in plant diseases, such as those that confer resistance to one or more plant diseases, such as any one or more of those listed in PCT Publication WO 2013046247. Exemplary rice diseases/disease causing organisms that the modified plant can be resistant to are, without limitation, Magnaporthe grisea, Cochliobolus miyabeanus, Rhizoctonia solani, and Gibberella fujikuroi.

[0733] Exemplary wheat diseases/disease causing organisms that the modified plant can be resistant to are, without limitation, Erysiphe graminis, Fusarium graminearum, F. avenaceum, F. culmorum, Microdochium nivale, Puccinia striiformis, P. graminis, P. recondita, Micronectriella nivale, Typhula sp., Ustilago tritici, Tilletia caries, Pseudocercosporella herpotrichoides, Mycosphaerella graminicola, Stagonospora nodorum, and Pyrenophora tritici-repentis.

[0734] Exemplary barley diseases/disease causing organisms that the modified plant can be resistant to are, without limitation, Erysiphe graminis, Fusarium graminearum, F. avenaceum, F. culmorum, Microdochium nivale, Puccinia striiformis, P. graminis, P. hordei, Ustilago nuda, Rhynchosporium secalis, Pyrenophora teres, Cochliobolus sativus, Pyrenophora graminea, and Rhizoctonia solani.

[0735] Exemplary maize diseases/disease causing organisms that the modified plant can be resistant to are, without limitation, Ustilago maydis, Cochliobolus heterostrophus, Gloeocercospora sorghi, Puccinia polysora, Cercospora zeae-maydis, Rhizoctonia solani.

[0736] Exemplary citrus diseases/disease causing organisms that the modified plant can be resistant to are, without limitation, Diaporthe citri, Elsinoe fawcetti, Penicillium digitatum, P. italicum, Phytophthora parasitica, and Phytophthora citrophthora.

[0737] Exemplary apple diseases/disease causing organisms that the modified plant can be resistant to are, without limitation, Monilinia mali, Valsa ceratosperma, Podosphaera leucotricha, Alternaria alternata apple pathotype, Venturia inaequalis, Colletotrichum acutatum, Phytophtora cactorum.

[0738] Exemplary pear diseases/disease causing organisms that the modified plant can be resistant to are, without limitation, Venturia nashicola, V. pirina, Alternaria alternata Japanese pear pathotype, Gymnosporangium haraeanum, and Phytophtora cactorum.

[0739] Exemplary peach diseases/disease causing organisms that the modified plant can be resistant to are, without limitation, Monilinia fructicola, Cladosporium carpophilum, and Phomopsis sp.

[0740] Exemplary grape diseases/disease causing organisms that the modified plant can be resistant to are, without limitation, Elsinoe ampelina, Glomerella cingulata, Uninula necator, Phakopsora ampelopsidis, Guignardia bidwellii, and Plasmopara viticola.

[0741] Exemplary persimmon diseases/disease causing organisms that the modified plant can be resistant to are, without limitation, Gloesporium kaki, Cercospora kaki, and Mycosphaerela nawae.

[0742] Exemplary gourd diseases/disease causing organisms that the modified plant can be resistant to are, without limitation, Colletotrichum lagenarium, Sphaerotheca fuliginea, Mycosphaerella melonis, Fusarium oxysporum, Pseudoperonospora cubensis, and Phytophthora sp., Pythium sp.

[0743] Exemplary tomato diseases/disease causing organisms that the modified plant can be resistant to are, without limitation, Alternaria solani, Cladosporium fulvum, Phytophthora infestans; Pseudomonas syringae pv. Tomato; Phytophthora capsici; and Xanthomonas.

[0744] Exemplary eggplant diseases/disease causing organisms that the modified plant can be resistant to are, without limitation, Phomopsis vexans and Erysiphe cichoracearum.

[0745] Exemplary Brassicaceous vegetable diseases/disease causing organisms that the modified plant can be resistant to are, without limitation, Alternaria japonica, Cercosporella brassicae, Plasmodiophora brassicae, and Peronospora parasitica.

[0746] Exemplary Welsh onion diseases/disease causing organisms that the modified plant can be resistant to are, without limitation, Puccinia allii and Peronospora destructor.

[0747] Exemplary Welsh onion diseases/disease causing organisms that the modified plant can be resistant to are, without limitation Cercospora kikuchii, Elsinoe glycines, Diaporthe phaseolorum var. sojae, Septoria glycines, Cercospora sojina, Phakopsora pachyrhizi, Phytophthora sojae, Rhizoctonia solani, Corynespora casiicola, and Sclerotinia sclerotiorum.

[0748] Exemplary kidney bean diseases/disease causing organisms that the modified plant can be resistant to are, without limitation, Colletrichum lindemthianum.

[0749] Exemplary peanut diseases/disease causing organisms that the modified plant can be resistant to are, without limitation, Cercospora personata, Cercospora arachidicola, and Sclerotium rolfsii.

[0750] Exemplary pea diseases/disease causing organisms that the modified plant can be resistant to are, without limitation, Erysiphe pisi.

[0751] Exemplary potato diseases/disease causing organisms that the modified plant can be resistant to are, without limitation, Alternaria solani, Phytophthora infestans, Phytophthora erythroseptica, Spongospora subterranean, and f. sp. Subterranean.

[0752] Exemplary strawberry diseases/disease causing organisms that the modified plant can be resistant to are, without limitation, Sphaerotheca humuli and Glomerella cingulate.

[0753] Exemplary tea diseases/disease causing organisms that the modified plant can be resistant to are, without limitation, Exobasidium reticulatum, Elsinoe leucospila, Pestalotiopsis sp., and Colletotrichum theae-sinensis.

[0754] Exemplary tobacco diseases/disease causing organisms that the modified plant can be resistant to are, without limitation, Alternaria longipes, Erysiphe cichoracearum, Colletotrichum tabacum, Peronospora tabacina, and Phytophthora nicotianae.

[0755] Exemplary rapeseed diseases/disease causing organisms that the modified plant can be resistant to are, without limitation, Sclerotinia sclerotiorum, and Rhizoctonia solani.

[0756] Exemplary cotton diseases/disease causing organisms that the modified plant can be resistant to are, without limitation, Rhizoctonia solani.

[0757] Exemplary beet diseases/disease causing organisms that the modified plant can be resistant to are, without limitation, Cercospora beticola, Thanatephorus cucumeris, Thanatephorus cucumeris, and Aphanomyces cochlioides.

[0758] Exemplary rose diseases/disease causing organisms that the modified plant can be resistant to are, without limitation, Diplocarpon rosae, Sphaerotheca pannosa, and Peronospora sparsa.

[0759] Exemplary chrysanthemum and asteraceae diseases/disease causing organisms that the modified plant can be resistant to are, without limitation, Bremia lactuca, Septoria chrysanthemi-indici, and Puccinia horiana.

[0760] Exemplary radish diseases/disease causing organisms that the modified plant can be resistant to are, without limitation, Alternaria brassicicola.

[0761] Exemplary zoysia diseases/disease causing organisms that the modified plant can be resistant to are, without limitation, Sclerotinia homeocarpa, and Rhizoctonia solani.

[0762] Exemplary banana diseases/disease causing organisms that the modified plant can be resistant to are, without limitation, Mycosphaerella fijiensis and Mycosphaerella musicola.

[0763] Exemplary sunflower diseases/disease causing organisms that the modified plant can be resistant to are, without limitation, and Plasmopara halstedii.

[0764] Exemplary seed or initial stage of plant growth diseases/disease causing organisms that the modified plant can be resistant to are, without limitation, Aspergillus spp., Penicillium spp., Fusarium spp., Gibberella spp., Tricoderma spp., Thielaviopsis spp., Rhizopus spp., Mucor spp., Corticium spp., Rhoma spp., Rhizoctonia spp., Diplodia spp., and the like.

[0765] Other exemplary diseases/disease causing organisms that the modified plant can be resistant to are, without limitation, Pythium aphanidermatum, Pythium debarianum, Pythium graminicola, Pythium irregulare, Pythium ultimum, Botrytis cinerea, Sclerotinia sclerotiorum, Polymixa spp., Olpidium spp.

Genes that Confer Resistance to Herbicides

[0766] In some embodiments, the CRISPR-Cas systems described herein can be used to modify a plant or cell thereof such that the modified plant or cell thereof contains one or more genes that confer herbicide resistance to the plant.

[0767] In some embodiments, the modified plant or cell thereof can contain one or more genes that confer resistance to herbicides that inhibit the growing point or meristem, such as an imidazolinone or a sulfonylurea, for example, by Lee et al., EMBO J. 7:1241 (1988), and Miki et al., Theor. Appl. Genet. 80:449 (1990), respectively.

[0768] In some embodiments, the modified plant or cell thereof can contain one or more genes that confer glyphosate tolerance (e.g., mutant 5-enolpyruvylshikimate-3-phosphate synthase (EPSPs) genes, aroA genes and glyphosate acetyl transferase (GAT) genes, respectively), or resistance to other phosphono compounds such as by glufosinate (e.g., phosphinothricin acetyl transferase (PAT) genes from Streptomyces species, including Streptomyces hygroscopicus and Streptomyces viridichromogenes), and to pyridinoxy or phenoxy proprionic acids and cyclohexones (e.g., ACCase inhibitor-encoding genes. See, for example, U.S. Pat. Nos. 4,940,835 and 6,248,876, 4,769,061, EP No. 0 333 033 and U.S. Pat. No. 4,975,374. See also EP No. 0242246, DeGreef et al., Bio/Technology 7:61 (1989), Marshall et al., Theor. Appl. Genet. 83:435 (1992), and WO 2005012515 to Castle et. al. and WO 2005107437).

[0769] In some embodiments, the modified plant or cell thereof can contain one or more genes that confer resistance to herbicides that inhibit photosynthesis, such as a triazine (e.g., psbA and gs+ genes) or a benzonitrile (e.g., nitrilase gene), and glutathione S-transferase in Przibila et al., Plant Cell 3:169 (1991), U.S. Pat. No. 4,810,648, and Hayes et al., Biochem. J. 285: 173 (1992).

[0770] In some embodiments, the modified plant or cell thereof can contain one or more genes encoding enzymes that can detoxify a herbicide or a mutant glutamine synthase enzyme that is resistant to inhibition, e.g. n U.S. patent application Ser. No. 11/760,602. Or a detoxifying enzyme is an enzyme encoding a phosphinothricin acetyltransferase (such as the bar or pat protein from Streptomyces species). Phosphinothricin acetyltransferases are for example described in U.S. Pat. Nos. 5,561,236; 5,648,477; 5,646,024; 5,273,894; 5,637,489; 5,276,268; 5,739,082; 5,908,810 and 7,112,665.

[0771] In some embodiments, the modified plant or cell thereof can contain one or more genes encoding hydroxyphenylpyruvatedioxygenases (HPPD) inhibitors, i.e., naturally occurring HPPD resistant enzymes, or genes encoding a mutated or chimeric HPPD enzyme as described in WO 96/38567, WO 99/24585, and WO 99/24586, WO 2009/144079, WO 2002/046387, or U.S. Pat. No. 6,768,044.

### Genes Involved in Abiotic Stress Tolerance

[0772] In some embodiments, the CRISPR-Cas systems described herein can be used to modify a plant or a cell thereof such that the modified or cell thereof plant contains one or more genes that confer abiotic stress tolerance to the plant.

[0773] In some embodiments, the modified plant or cell thereof can contain one or more transgenes capable of reducing the expression and/or the activity of poly(ADP-ribose) polymerase (PARP) gene in the plant cells or plants as described in WO 00/04173 or WO/2006/045633.

[0774] In some embodiments, the modified plant or cell thereof can contain one or more transgenes capable of reducing the expression and/or the activity of the PARG encoding genes of the plants or plants cells, as described e.g. in WO 2004/090140.

[0775] In some embodiments, the modified plant or cell thereof can contain one or more transgenes coding for a plant-functional enzyme of the nicotinamide adenine dinucleotide salvage synthesis pathway including nicotinamidase, nicotinate phosphoribosyltransferase, nicotinic acid mononucleotide adenyl transferase, nicotinamide adenine dinucleotide synthetase or nicotine amide phosphorybosyltransferase as described e.g. in EP 04077624.7, WO 2006/133827, PCT/EP07/002,433, EP 1999263, or WO 2007/107326.

[0776] In some embodiments, the modified plant or cell thereof can be modified to contain one or more genes encoding enzyme(s) involved in carbohydrate biosynthesis. Such enzymes include those described in e.g. EP 0571427, WO 95/04826, EP 0719338, WO 96/15248, WO 96/19581, WO 96/27674, WO 97/11188, WO 97/26362, WO 97/32985, WO 97/42328, WO 97/44472, WO 97/45545, WO 98/27212, WO 98/40503, WO99/58688, WO 99/58690, WO 99/58654, WO 00/08184, WO 00/08185, WO 00/08175, WO 00/28052, WO 00/77229, WO 01/12782, WO 01/12826, WO 02/101059, WO 03/071860, WO 2004/056999, WO 2005/030942, WO 2005/030941, WO 2005/095632, WO 2005/095617, WO 2005/095619, WO 2005/095618, WO 2005/123927, WO 2006/018319, WO 2006/103107, WO 2006/108702, WO 2007/009823, WO 00/22140, WO 2006/063862, WO 2006/072603, WO 02/034923, EP 06090134.5, EP 06090228.5, EP 06090227.7, EP 07090007.1, EP 07090009.7, WO 01/14569, WO 02/79410, WO 03/33540, WO 2004/078983, WO 01/19975, WO 95/26407, WO 96/34968, WO 98/20145, WO 99/12950, WO 99/66050, WO 99/53072, U.S. Pat. No. 6,734,341, WO 00/11192, WO 98/22604, WO 98/32326, WO 01/98509, WO 01/98509, WO 2005/002359, U.S. Pat. Nos. 5,824,790, 6,013,861, WO 94/04693, WO 94/09144, WO 94/11520, WO 95/35026 or WO 97/20936. In some embodiments, the modified plant or cell thereof can be modified to contain one or more genes encoding enzyme(s) involved in the production of polyfructose, especially of the inulin and levan-type, as disclosed in EP 0663956, WO 96/01904, WO 96/21023, WO 98/39460, and WO 99/24593. In some embodiments, the modified plant or cell thereof can be modified to contain one or more genes encoding enzyme(s) involved in the production of alpha-1,4-glucans as disclosed in WO 95/31553, US 2002031826, U.S. Pat. Nos. 6,284,479, 5,712,107, WO 97/47806, WO 97/47807, WO 97/47808 and WO 00/14249. In some embodiments, the modified plant or cell thereof can be modified to contain one or more genes encoding enzyme(s) involved in the production of alpha-1,6 branched alpha-1,4-glucans, as disclosed in WO 00/73422, the production of alternan, as disclosed in e.g. WO 00/47727, WO 00/73422, EP 06077301.7, U.S. Pat. No. 5,908,975 and EP 0728213. In some embodiments, the modified plant or cell thereof can be modified to contain one or more genes encoding enzyme(s) involved in the production of hyaluronan, as for example disclosed in WO 2006/032538, WO 2007/039314, WO 2007/039315, WO 2007/039316, JP 2006304779, and WO 2005/012529.

[0777] In some embodiments, the modified plant or cell thereof can be modified to contain one or more genes that improve drought resistance. For example, International Patent Publication No. WO 2013122472 discloses that the absence or reduced level of functional Ubiquitin Protein Ligase protein (UPL) protein, more specifically, UPL3, leads to a decreased need for water or improved resistance to drought of said plant. In some embodiments, the modified plant or cell thereof can be modified to contain one or more genes that cause the absence or reduced level of functional Ubiquitin Protein Ligase protein (UPL) protein, more specifically, UPL3. In some embodiments, this can include knocking out a UPL gene, such as UPL3.

[0778] Other examples of transgenic plants with increased drought tolerance are disclosed in, for example, US 2009/0144850, US 2007/0266453, and WO 2002/083911. US2009/0144850 describes a plant displaying a drought tolerance phenotype due to altered expression of a DR02 nucleic acid. US 2007/0266453 describes a plant displaying a drought tolerance phenotype due to altered expression of a DR03 nucleic acid and WO 2002/08391 1 describes a plant having an increased tolerance to drought stress due to a reduced activity of an ABC transporter which is expressed in guard cells. Another example is the work by Kasuga and co-authors (1999), who describe that overexpression of cDNA encoding DREB1 A in transgenic plants activated the expression of many stress tolerance genes under normal growing conditions and resulted in improved tolerance to drought, salt loading, and freezing. However, the expression of DREB1A also resulted in severe growth retardation under normal growing conditions (Kasuga (1999) Nat Biotechnol 17(3) 287-291). In some embodiments, the CRISPR-Cas systems described herein can be used to modify a plant to contain any of these genes associated with drought tolerance.

### Increasing the Fertility Stage in Plants

[0779] The CRISPR-Cas systems described herein can be used to generate male sterile plants. Hybrid plants typically have advantageous agronomic traits compared to inbred plants. However, for self-pollinating plants, the generation of hybrids can be challenging. In different plant types, genes have been identified which are important for plant fertility, more particularly male fertility. For instance, in maize, at least two genes have been identified which are important in fertility (Amitabh Mohanty International Conference on New Plant Breeding Molecular Technologies Technology Development and Regulation, Oct. 9-10, 2014, Jaipur, India; Svitashev et al. Plant Physiol. 2015 October; 169(2):931-45; Djukanovic et al. Plant J. 2013 December; 76(5):888-99). The methods provided herein can be used to target genes required for male fertility so as to generate male sterile plants which can easily be crossed to generate hybrids. In particular embodiments, the CRISPR-Cas system provided herein is used for targeted mutagenesis of the cytochrome P450-like gene (MS26) or the meganuclease gene (MS45) thereby conferring male sterility to the maize plant. Maize plants which are as such genetically altered can be used in hybrid breeding programs.

[0780] In particular embodiments, the methods provided herein are used to prolong the fertility stage of a plant such as of a rice plant. For instance, a rice fertility stage gene such as Ehd3 can be targeted in order to generate a mutation in the gene and plantlets can be selected for a prolonged regeneration plant fertility stage (as described in CN 104004782).

### Generating Genetic Variation

[0781] The CRISPR-Cas systems described herein can be used to generate genetic variation in a crop of interest. The availability of wild germplasm and genetic variations in crop plants is the key to crop improvement programs, but the available diversity in germplasms from crop plants is limited. The present invention envisages methods for generating a diversity of genetic variations in a germplasm of interest. In this application of the CRISPR-Cas system a library of guide RNAs targeting different locations in the plant genome is provided and is introduced into plant cells together with the Cas (e.g., a small Type II-D Cas protein or variant thereof) effector protein(s). In this way a collection of genome-scale point mutations and gene knock-outs can be generated. In particular embodiments, the methods comprise generating a plant part or plant from the cells so obtained and screening the cells for a trait of interest. The target genes can include both coding and non-coding regions. In particular embodiments, the trait is stress tolerance and the method is a method for the generation of stress-tolerant crop varieties

### Modulating Fruit Ripening

[0782] The CRISPR Cas systems described herein can be used to affect fruit-ripening. Ripening is a normal phase in the maturation process of fruits and vegetables. Only a few days after it starts it renders a fruit or vegetable inedible. This process brings significant losses to both farmers and consumers. In some embodiments the CRISPR-Cas systems described herein can be used to introduce one or more genes or modify one or more endogenous genes such that ethylene production is altered, such as decreased. In some embodiments, CRISPR-Cas systems described herein can be used to introduce one or more genes or modify one or more endogenous genes such that ACC (1-aminocyclopropane-1-carboxylic acid) synthase gene expression or ACC synthase levels are reduced and/or its function is altered, e.g., reduced. ACC synthase is the enzyme responsible for the conversion of S-adenosylmethionine (SAM) to ACC; the second to the last step in ethylene biosynthesis. In some embodiments, the CRISPR-Cas systems described herein can be used to introduce an antisense (“mirror-image”) or truncated copy of the ACC synthase gene into the plant's genome.

[0783] In some embodiments, reduction of ethylene production can be achieved by introducing an ACC deaminase. In some embodiments, the CRISPR-Cas systems described herein can be used to introduce an ACC deaminase gene into the plant's genome. An exemplary ACC deaminase gene can be that from Pseudomonas chlororaphis, a common nonpathogenic soil bacterium. It converts ACC to a different compound thereby reducing the amount of ACC available for ethylene production.

[0784] In some embodiments, reduction of ethylene production can be achieved by introducing a SAM hydrolase. In some embodiments, the CRISPR-Cas systems described herein can introduce a SAM hydrolase gene into the plant's genome. This approach is similar to ACC deaminase wherein ethylene production is hindered when the amount of its precursor metabolite is reduced; in this case SAM is converted to homoserine. In some embodiments the gene encoding the SAM hydrolase is from E. coli T3 bacteriophage.

[0785] In some embodiments, reduction of ethylene production can be achieved by suppression of ACC oxidase. In some embodiments, the CRISPR-Cas systems described herein can be used to introduce one or more genes that result in and suppression of ACC oxidase gene expression. ACC oxidase is the enzyme which catalyzes the oxidation of ACC to ethylene, the last step in the ethylene biosynthetic pathway. Using the methods described herein, down regulation of the ACC oxidase gene results in the suppression of ethylene production, thereby delaying fruit ripening.

[0786] In particular embodiments, additionally or alternatively to the modifications described above, the methods and CRISPR-Cas systems described herein are used to modify ethylene receptors, so as to interfere with ethylene signals obtained by the fruit. In particular embodiments, the CRISPR-Cas systems described herein are used to introduce and/or modify one or more genes that result in altered, and more specifically decreased or suppressed, expression of the ETR1 gene, encoding an ethylene binding protein is modified. In particular embodiments, additionally or alternatively to the modifications described above, the methods and CRISPR-Cas systems described herein are used to modify expression of the gene encoding Polygalacturonase (PG), which is the enzyme responsible for the breakdown of pectin, the substance that maintains the integrity of plant cell walls. Pectin breakdown occurs at the start of the ripening process resulting in the softening of the fruit. Accordingly, in particular embodiments, the methods and CRISPR-Cas systems described herein are used to introduce a mutation in the PG gene or to suppress activation of the PG gene in order to reduce the amount of PG enzyme produced thereby delaying pectin degradation.

### Increasing Storage Life of Plants and Plant Products

[0787] In particular embodiments, the methods and CRISPR-Cas systems described herein are used to modify one or more genes involved in the production of compounds which affect storage life of the plant or plant part. In some embodiments, the modification is in a gene that prevents the accumulation of reducing sugars in potato tubers. Upon high-temperature processing, these reducing sugars react with free amino acids, resulting in brown, bitter-tasting products and elevated levels of acrylamide, which is a potential carcinogen. In particular embodiments, the methods and CRISPR-Cas systems provided herein are used to reduce or inhibit expression of the vacuolar invertase gene (VInv), which encodes a protein that breaks down sucrose to glucose and fructose (Clasen et al. DOI: 10.1111/pbi.12370).

### Nutritionally Improved Plants

[0788] In particular embodiments, the CRISPR-Cas system described herein is used to produce nutritionally improved agricultural crops. In particular embodiments, the methods provided herein are adapted to generate “functional foods”, i.e. a modified food or food ingredient that may provide a health benefit beyond the traditional nutrients it contains and or “nutraceutical”, i.e. substances that may be considered a food or part of a food and provides health benefits, including the prevention and treatment of disease. In particular embodiments, the nutraceutical is useful in the prevention and/or treatment of one or more of cancer, diabetes, cardiovascular disease, and hypertension.

[0789] Examples of nutritionally improved crops include, but are not limited to, those discussed in Newell-McGloughlin, Plant Physiology, July 2008, Vol. 147, pp. 939-953). In some embodiments, the CRISPR-Cas systems described herein can be used to modify a plant's protein quality, content and/or amino acid composition, such as have been described for Bahiagrass (Luciani et al. 2005, Florida Genetics Conference Poster), Canola (Roesler et al., 1997, Plant Physiol 113 75-81), Maize (Cromwell et al, 1967, 1969 J Anim Sci 26 1325-1331, O'Quin et al. 2000 J Anim Sci 78 2144-2149, Yang et al. 2002, Transgenic Res 11 11-20, Young et al. 2004, Plant J 38 910-922), Potato (Yu J and Ao, 1997 Acta Bot Sin 39 329-334; Chakraborty et al. 2000, Proc Natl Acad Sci USA 97 3724-3729; Li et al. 2001) Chin Sci Bull 46 482-484, Rice (Katsube et al. 1999, Plant Physiol 120 1063-1074), Soybean (Dinkins et al. 2001, Rapp 2002, In vitro Cell Dev Biol Plant 37 742-747), Sweet Potato (Egnin and Prakash 1997, In vitro Cell Dev Biol 33 52A).

[0790] In some embodiments, the CRISPR-Cas systems described herein can be used to modify a plant's essential amino acid content, such as has been described for Canola (Falco et al. 1995, Bio/Technology 13 577-582), Lupin (White et al. 2001, J Sci Food Agric 81 147-154), Maize (Lai and Messing, 2002, Agbios 2008 GM crop database (Mar. 11, 2008)), Potato (Zeh et al. 2001, Plant Physiol 127 792-802), Sorghum (Zhao et al. 2003, Kluwer Academic Publishers, Dordrecht, The Netherlands, pp 413-416), Soybean (Falco et al. 1995 Bio/Technology 13 577-582; Galili et al. 2002 Crit Rev Plant Sci 21 167-204).

[0791] In some embodiments, the CRISPR-Cas systems described herein can be used to modify a plant's oils and fatty acids, such as for Canola (Dehesh et al. (1996) Plant J 9 167-172 [PubMed]; Del Vecchio (1996) INFORM International News on Fats, Oils and Related Materials 7 230-243; Roesler et al. (1997) Plant Physiol 113 75-81 [PMC free article][PubMed]; Froman and Ursin (2002, 2003) Abstracts of Papers of the American Chemical Society 223 U35; James et al. (2003) Am J Clin Nutr 77 1140-1145 [PubMed]; Agbios (2008, above); coton (Chapman et al. (2001). J Am Oil Chem Soc 78 941-947; Liu et al. (2002) J Am Coll Nutr 21 205S-211S [PubMed]; O'Neill (2007) Australian Life Scientist. http://www.biotechnews.com.au/index.php/id;866694817;fp;4;fpid;2 (Jun. 17, 2008), Linseed (Abbadi et al., 2004, Plant Cell 16: 2734-2748), Maize (Young et al., 2004, Plant J 38 910-922), oil palm (Jalani et al. 1997, J Am Oil Chem Soc 74 1451-1455; Parveez, 2003, AgBiotechNet 113 1-8), Rice (Anai et al., 2003, Plant Cell Rep 21 988-992), Soybean (Reddy and Thomas, 1996, Nat Biotechnol 14 639-642; Kinney and Kwolton, 1998, Blackie Academic and Professional, London, pp 193-213), Sunflower (Arcadia, Biosciences 2008).

[0792] In some embodiments, the CRISPR-Cas systems described herein can be used to modify a plant's carbohydrate content, such as Fructans described for Chicory (Smeekens (1997) Trends Plant Sci 2 286-287, Sprenger et al. (1997) FEBS Lett 400 355-358, Sevenier et al. (1998) Nat Biotechnol 16 843-846), Maize (Caimi et al. (1996) Plant Physiol 110 355-363), Potato (Hellwege et al., 1997 Plant J 12 1057-1065), Sugar Beet (Smeekens et al. 1997, above), Inulin, such as described for Potato (Hellewege et al. 2000, Proc Natl Acad Sci USA 97 8699-8704), Starch, such as described for Rice (Schwall et al. (2000) Nat Biotechnol 18 551-554, Chiang et al. (2005) Mol Breed 15 125-143),

[0793] In some embodiments, the CRISPR-Cas systems described herein can be used to modify a plant's vitamins and carotenoid content, such as described for Canola (Shintani and DellaPenna (1998) Science 282 2098-2100), Maize (Rocheford et al. (2002). J Am Coll Nutr 21 191S-198S, Cahoon et al. (2003) Nat Biotechnol 21 1082-1087, Chen et al. (2003) Proc Natl Acad Sci USA 100 3525-3530), Mustardseed (Shewmaker et al. (1999) Plant J 20 401-412, Potato (Ducreux et al., 2005, J Exp Bot 56 81-89), Rice (Ye et al. (2000) Science 287 303-305, Strawberry (Agius et al. (2003), Nat Biotechnol 21 177-181), Tomato (Rosati et al. (2000) Plant J 24 413-419, Fraser et al. (2001) J Sci Food Agric 81 822-827, Mehta et al. (2002) Nat Biotechnol 20 613-618, Diaz de la Garza et al. (2004) Proc Natl Acad Sci USA 101 13720-13725, Enfissi et al. (2005) Plant Biotechnol J 3 17-27, DellaPenna (2007) Proc Natl Acad Sci USA 104 3675-3676.

[0794] In some embodiments, the CRISPR-Cas systems described herein can be used to modify a plant's functional secondary metabolites, such as described for Apple (stilbenes, Szankowski et al. (2003) Plant Cell Rep 22: 141-149), Alfalfa (resveratrol, Hipskind and Paiva (2000) Mol Plant Microbe Interact 13 551-562), Kiwi (resveratrol, Kobayashi et al. (2000) Plant Cell Rep 19 904-910), Maize and Soybean (flavonoids, Yu et al. (2000) Plant Physiol 124 781-794), Potato (anthocyanin and alkaloid glycoside, Lukaszewicz et al. (2004) J Agric Food Chem 52 1526-1533), Rice (flavonoids & resveratrol, Stark-Lorenzen et al. (1997) Plant Cell Rep 16 668-673, Shin et al. (2006) Plant Biotechnol J 4 303-315), Tomato (+resveratrol, chlorogenic acid, flavonoids, stilbene; Rosati et al. (2000) above, Muir et al. (2001) Nature 19 470-474, Niggeweg et al. (2004) Nat Biotechnol 22 746-754, Giovinazzo et al. (2005) Plant Biotechnol J 3 57-69), wheat (caffeic and ferulic acids, resveratrol; United Press International (2002)).

[0795] In some embodiments, the CRISPR-Cas systems described herein can be used to modify a plant's mineral availabilities and/or content such as described for Alfalfa (phytase, Austin-Phillips et al. (1999) http://www.molecularfarming.com/nonmedical.html), Lettuce (iron, Goto et al. (2000) Theor Appl Genet 100 658-664), Rice (iron, Lucca et al. (2002) J Am Coll Nutr 21 184S-190S), Maize, Soybean and wheat (phytase, Drakakaki et al. (2005) Plant Mol Biol 59 869-880, Denbow et al. (1998) Poult Sci 77 878-881, Brinch-Pedersen et al. (2000) Mol Breed 6 195-206).

[0796] In particular embodiments, the value-added trait is related to the envisaged health benefits of the compounds present in the plant. For instance, in particular embodiments, the value-added crop is obtained by applying the methods and CRISPR-Cas systems described herein to modify and/or induce/increase the synthesis of one or more of the following compounds:
[0797] a) Carotenoids, such as α-Carotene present in carrots which Neutralizes free radicals that may cause damage to cells or β-Carotene present in various fruits and vegetables which neutralizes free radicals;
[0798] b) Lutein, such as that present in green vegetables which contributes to maintenance of healthy vision;
[0799] c) Lycopene present in tomato and tomato products, which is believed to reduce the risk of prostate cancer;
[0800] d) Zeaxanthin, present in citrus and maize, which contributes to maintenance of healthy vision;
[0801] e) dietary fiber, such as insoluble fiber present in wheat bran which may reduce the risk of breast and/or colon cancer and β-Glucan present in oat, soluble fiber present in Psyllium and whole cereal grains which may reduce the risk of cardiovascular disease (CVD)
[0802] f) Fatty acids, such as ω-3 fatty acids which may reduce the risk of CVD and improve mental and visual functions, conjugated linoleic acid, which may improve body composition, may decrease risk of certain cancers and GLA which may reduce inflammation risk of cancer and CVD, may improve body composition;
[0803] g) Flavonoids, such as Hydroxycinnamates, present in wheat which have Antioxidant-like activities, may reduce risk of degenerative diseases, flavonols, catechins and tannins present in fruits and vegetables which neutralize free radicals and may reduce risk of cancer
[0804] h) Glucosinolates, indoles, and isothiocyanates, such as Sulforaphane, present in Cruciferous vegetables (broccoli, kale, and horseradish), which neutralize free radicals, may reduce risk of cancer;
[0805] i) phenolics, such as stilbenes present in grape (may reduce risk of degenerative diseases, heart disease, and cancer, may have longevity effect), caffeic acid and ferulic acid present in vegetables and citrus (have antioxidant-like activities and may reduce risk of degenerative diseases, heart disease, and eye disease), and epicatechin present in cacao (has antioxidant-like activities and may reduce risk of degenerative diseases and heart disease);
[0806] j) Plant stanols/sterols present in maize, soy, wheat and wooden oils, which may reduce risk of coronary heart disease by lowering blood cholesterol levels;
[0807] k) Fructans, inulins, fructo-oligosaccharides present in Jerusalem artichoke, shallot, onion powder, which may improve gastrointestinal health;
[0808] l) saponins present in soybean, which may lower LDL cholesterol;
[0809] m) soybean protein present in soybean, which may reduce risk of heart disease;
[0810] n) phytoestrogens such as isoflavones present in soybean, which may reduce menopause symptoms, such as hot flashes, may reduce osteoporosis and CVD and lignans present in flax, rye and vegetables, which may protect against heart disease and some cancers, may lower LDL cholesterol, total cholesterol;
[0811] o) sulfides and thiols such as diallyl sulphide present in onion, garlic, olive, leek and scallions and Allyl methyl trisulfide, dithiolthiones present in cruciferous vegetables, which may lower LDL cholesterol and helps to maintain healthy immune system; and
[0812] p) tannins, such as proanthocyanidins, present in cranberry, cocoa, which may improve urinary tract health and may reduce risk of CVD and high blood pressure.

[0813] In addition, the methods and CRISPR-Cas systems described herein can be used to modify the protein/starch functionality, shelf life, taste/aesthetics, fiber quality, and allergen, antinutrient, and toxin reduction traits of a plant or a cell thereof.

[0814] In some embodiments, a method of using the CRISPR-Cas systems described herein to produce plants with nutritional added value can include introducing into a plant cell a gene encoding an enzyme involved in the production of a component of added nutritional value using the CRISPR-Cas system as described herein and regenerating a plant from said plant cell, said plant characterized in an increase expression of said component of added nutritional value. In particular embodiments, the CRISPR-Cas system is used to modify the endogenous synthesis of these compounds indirectly, e.g. by modifying one or more transcription factors that controls the metabolism of this compound. Methods for introducing a gene of interest into a plant cell and/or modifying an endogenous gene using the CRISPR-Cas system are described elsewhere herein.

[0815] Some specific examples of modifications in plants that have been modified to confer value-added traits are: plants with modified fatty acid metabolism, for example, by transforming a plant with an antisense gene of stearyl-ACP desaturase to increase stearic acid content of the plant. See Knultzon et al., Proc. Natl. Acad. Sci. U.S.A. 89:2624 (1992). Another example involves decreasing phytate content, for example by cloning and then reintroducing DNA associated with the single allele which may be responsible for maize mutants characterized by low levels of phytic acid. See Raboy et al, Maydica 35:383 (1990).

[0816] Similarly, expression of the maize (Zea mays) Tfs C1 and R, which regulate the production of flavonoids in maize aleurone layers under the control of a strong promoter, resulted in a high accumulation rate of anthocyanins in Arabidopsis (Arabidopsis thaliana), presumably by activating the entire pathway (Bruce et al., 2000, Plant Cell 12:65-80). DellaPenna (Welsch et al., 2007 Annu Rev Plant Biol 57: 711-738) found that Tf RAP2.2 and its interacting partner SINAT2 increased carotenogenesis in Arabidopsis leaves. Expressing the Tf Dof1 induced the up-regulation of genes encoding enzymes for carbon skeleton production, a marked increase of amino acid content, and a reduction of the Glc level in transgenic Arabidopsis (Yanagisawa, 2004 Plant Cell Physiol 45: 386-391), and the DOF Tf AtDof1.1 (OBP2) up-regulated all steps in the glucosinolate biosynthetic pathway in Arabidopsis (Skirycz et al., 2006 Plant J 47: 10-24).

### Reducing Allergen in Plants

[0817] In particular embodiments, the methods and CRISPR-Cas systems described herein can be used to generate plants with a reduced level of allergens, making them safer for the consumer. In particular embodiments, the methods can include modifying expression of one or more genes responsible for the production of plant allergens. For instance, in particular embodiments, the methods comprise down-regulating expression of a Lol p5 gene in a plant cell, such as a ryegrass plant cell and regenerating a plant therefrom so as to reduce allergenicity of the pollen of said plant (Bhalla et al. 1999, Proc. Natl. Acad. Sci. USA Vol. 96: 11676-11680).

[0818] Peanut allergies and allergies to legumes generally are a real and serious health concern. The Cas (e.g., small Type II-D Cas) effector protein system of the present invention can be used to identify and then edit or silence genes encoding allergenic proteins of such legumes. Without limitation as to such genes and proteins, Nicolaou et al. identifies allergenic proteins in peanuts, soybeans, lentils, peas, lupin, green beans, and mung beans. See, Nicolaou et al., Current Opinion in Allergy and Clinical Immunology 2011; 11(3):222).

### Further Applications of the CRISPR-Cas Systems in Plants

[0819] In particular embodiments, the CRISPR-Cas system described herein, can be used for visualization of genetic element dynamics. For example, CRISPR-Cas imaging can visualize either repetitive or non-repetitive genomic sequences, report telomere length change and telomere movements and monitor the dynamics of gene loci throughout the cell cycle (see e.g., Chen et al., Cell, 2013). These methods may also be applied to plants using the CRISPR-Cas systems described herein.

[0820] In some embodiments, the CRISPR-Cas systems described herein can be used for targeted gene disruption positive-selection screening in vitro and in vivo (see e.g., Malina et al., Genes and Development, 2013). These methods may also be applied to plants.

[0821] In particular embodiments, fusion of inactive Cas (e.g., a small Type II-D Cas protein or variant thereof) endonucleases with histone-modifying enzymes can introduce custom changes in the complex epigenome (see e.g., Rusk et al., Nature Methods, 2014). These methods may also be applied to plants.

[0822] In particular embodiments, the CRISPR-Cas systems described herein can be used to purify a specific portion of the chromatin and identify the associated proteins, thus elucidating their regulatory roles in transcription (e.g., Waldrip et al., Epigenetics, 2014). These methods may also be applied to plants.

[0823] In particular embodiments, present invention can be used as a therapy for virus removal in plant systems as it is able to cleave both viral DNA and RNA. Previous studies in human systems have demonstrated the success of utilizing CRISPR in targeting the single strand RNA virus, hepatitis C (see e.g., A. Price, et al., Proc. Natl. Acad. Sci, 2015) as well as the double stranded DNA virus, hepatitis B (see e.g., V. Ramanan, et al., Sci. Rep, 2015). These methods may also be adapted for using the CRISPR-Cas system described herein in plants.

[0824] In particular embodiments, the CRISPR-Cas systems described can be used to alter genome complexity. In further particular embodiment, the CRISPR system, and preferably the CRISPR-Cas system described herein, can be used to disrupt or alter chromosome number and generate haploid plants, which only contain chromosomes from one parent. Such plants can be induced to undergo chromosome duplication and converted into diploid plants containing only homozygous alleles (see e.g., Karimi-Ashtiyani et al., PNAS, 2015; Anton et al., Nucleus, 2014). These methods may also be applied to plants.

[0825] In particular embodiments, the CRISPR-Cas system described herein, can be used for self-cleavage. In these embodiments, the promotor of the Cas (e.g., a small Type II-D Cas protein or variant thereof) enzyme(s) and gRNA can be a constitutive promotor and a second gRNA is introduced in the same transformation cassette but controlled by an inducible promoter. This second gRNA can be designated to induce site-specific cleavage in the Cas (e.g., a small Type II-D Cas protein or variant thereof) gene in order to create a non-functional Cas (e.g., a small Type II-D Cas protein or variant thereof) protein(s). In a further particular embodiment, the second gRNA induces cleavage on both ends of the transformation cassette, resulting in the removal of the cassette from the host genome. This system offers a controlled duration of cellular exposure to the Cas enzyme and further minimizes off-target editing. Furthermore, cleavage of both ends of a CRISPR/Cas cassette can be used to generate transgene-free TO plants with bi-allelic mutations (as described for Cas9 e.g., Moore et al., Nucleic Acids Research, 2014; Schaeffer et al., Plant Science, 2015). The methods of Moore et al. may be applied to the small Type II-D CRISPR-Cas systems described herein.

[0826] Sugano et al. (Plant Cell Physiol. 2014 March; 55(3):475-81. doi: 10.1093/pcp/pcu014. Epub 2014 Jan. 18) reports the application of CRISPR-Cas9 to targeted mutagenesis in the liverwort Marchantia polymorpha L., which has emerged as a model species for studying land plant evolution. The U6 promoter of M. polymorpha was identified and cloned to express the gRNA. The target sequence of the gRNA was designed to disrupt the gene encoding auxin response factor 1 (ARF1) in M. polymorpha. Using Agrobacterium-mediated transformation, Sugano et al. isolated stable mutants in the gametophyte generation of M. polymorpha. CRISPR-Cas9-based site-directed mutagenesis in vivo was achieved using either the Cauliflower mosaic virus 35S or M. polymorpha EF1α promoter to express Cas9. Isolated mutant individuals showing an auxin-resistant phenotype were not chimeric. Moreover, stable mutants were produced by asexual reproduction of T1 plants. Multiple arf1 alleles were easily established using CRIPSR-Cas9-based targeted mutagenesis. The methods of Sugano et al. may be applied to the small Type II-D CRISPR-Cas systems described herein.

[0827] Ling et al. (BMC Plant Biology 2014, 14:327) developed a CRISPR-Cas9 binary vector set based on the pGreen or pCAMBIA backbone, as well as a gRNA This toolkit requires no restriction enzymes besides BsaI to generate final constructs harboring maize-codon optimized Cas9 and one or more gRNAs with high efficiency in as little as one cloning step. The toolkit was validated using maize protoplasts, transgenic maize lines, and transgenic Arabidopsis lines and was shown to exhibit high efficiency and specificity. Using this toolkit, targeted mutations of three Arabidopsis genes were detected in transgenic seedlings of the T1 generation. The multiple-gene mutations could be inherited by the next generation. (guide RNA) module vector set, as a toolkit for multiplex genome editing in plants. The toolbox of Lin et al. may be applied to the small Type II-D CRISPR-Cas systems described herein.

[0828] Protocols for targeted plant genome editing via CRISPR-Cas systems described herein are also available based on those disclosed for the CRISPR-Cas9 system in volume 1284 of the series Methods in Molecular Biology pp 239-255 10 Feb. 2015. A detailed procedure to design, construct, and evaluate dual gRNAs for plant codon optimized Cas9 (pcoCas9) mediated genome editing using Arabidopsis thaliana and Nicotiana benthamiana protoplasts s model cellular systems are described. Strategies to apply the CRISPR-Cas9 system to generating targeted genome modifications in whole plants are also discussed. The protocols described in the chapter may be applied to the small Type II-D CRISPR-Cas systems described herein.

[0829] Ma et al. (Mol Plant. 2015 Aug. 3; 8(8):1274-84. doi: 10.1016/j.molp.2015.04.007) reports robust CRISPR-Cas9 vector system, utilizing a plant codon optimized Cas9 gene, for convenient and high-efficiency multiplex genome editing in monocot and dicot plants. Ma et al. designed PCR-based procedures to rapidly generate multiple sgRNA expression cassettes, which can be assembled into the binary CRISPR-Cas9 vectors in one round of cloning by Golden Gate ligation or Gibson Assembly. With this system, Ma et al. edited 46 target sites in rice with an average 85.4% rate of mutation, mostly in biallelic and homozygous status. Ma et al. provide examples of loss-of-function gene mutations in TO rice and T1Arabidopsis plants by simultaneous targeting of multiple (up to eight) members of a gene family, multiple genes in a biosynthetic pathway, or multiple sites in a single gene. The methods of Ma et al. may be applied to the small Type II-D CRISPR-Cas systems described herein.

[0830] Lowder et al. (Plant Physiol. 2015 Aug. 21. pii: pp. 00636.2015) developed a CRISPR-Cas9 toolbox that allows for multiplex genome editing and transcriptional regulation of expressed, silenced or non-coding genes in plants. This toolbox provides a protocol and reagents to quickly and efficiently assemble functional CRISPR-Cas9 T-DNA constructs for monocots and dicots using Golden Gate and Gateway cloning methods. It comes with a full suite of capabilities, including multiplexed gene editing and transcriptional activation or repression of plant endogenous genes. T-DNA based transformation technology is fundamental to modern plant biotechnology, genetics, molecular biology and physiology. As such, a method for the assembly of Cas9 (WT, nickase or dCas9) and gRNA(s) into a T-DNA destination-vector of interest can be used with the CRISPR-Cas systems described herein. This assembly method is based on both Golden Gate assembly and MultiSite Gateway recombination. Three modules are used for this assembly. The first module is a Cas9 entry vector, which contains promoterless Cas9 or its derivative genes flanked by attL1 and attR5 sites. The second module is a gRNA entry vector which contains entry gRNA expression cassettes flanked by attL5 and attL2 sites. The third module includes attR1-attR2-containing destination T-DNA vectors that provide promoters of choice for Cas9 expression. The toolbox of Lowder et al. may be applied to the small Type II-D CRISPR-Cas systems described herein.

[0831] Wang et al. (bioRxiv 051342; doi: https://doi.org/10.1101/051342; Epub. May 12, 2016) demonstrate editing of homoeologous copies of four genes affecting important agronomic traits in hexaploid wheat using a multiplexed gene editing construct with several gRNA-tRNA units under the control of a single promoter. The methods of Wang et al., can be applied to the CRISPR-Cas systems described herein.

[0832] The CRISPR-Cas systems described herein can be used to modify one or more genes in a tree. The CRISPR-Cas systems described herein can be used for modification of herbaceous systems (see, e.g., Belhaj et al., Plant Methods 9: 39 and Harrison et al., Genes & Development 28: 1859-1872). In some embodiments, the CRISPR Cas systems described herein can be used to target single nucleotide polymorphisms (SNPs) in trees (see, e.g., Zhou et al., New Phytologist, Volume 208, Issue 2, pages 298-301, October 2015). Zhou et al., applied a CRISPR-Cas system in the woody perennial Populus using the 4-coumarate:CoA ligase (4CL) gene family as a case study and achieved 100% mutational efficiency for two 4CL genes targeted, with every transformant examined carrying biallelic modifications. The CRISPR-Cas system of Zhou et al., was highly sensitive to single nucleotide polymorphisms (SNPs), as cleavage for a third 4CL gene was abolished due to SNPs in the target sequence. These methods may be applied to the CRISPR-Cas systems described herein. In some embodiments, two 4CL genes, 4CL1 and 4CL2, associated with lignin and flavonoid biosynthesis, respectively can be targeted and modified by the CRISPR-Cas systems described herein. The Populus tremula x alba clone 717-1B4 routinely used for transformation is divergent from the genome-sequenced Populus trichocarpa. Therefore, in some embodiments, the 4CL1 and 4CL2 gRNAs can be designed from the reference genome are interrogated with in-house 717 RNA-Seq data to ensure the absence of SNPs which could limit Cas efficiency. A third gRNA can be designed for 4CL5, a genome duplicate of 4CL1, is also included. The corresponding 717 sequence can harbor one SNP in each allele near/within the PAM, both of which are expected to abolish targeting by the 4CL5-gRNA. All three gRNA target sites are located within the first exon. For 717 transformation, the gRNA can be expressed from the Medicago U6.6 promoter, along with a human codon-optimized Cas under control of the CaMV 35S promoter in a binary vector. Transformation with the Cas-only vector can serve as a control. Randomly selected 4CL1 and 4CL2 lines are subjected to amplicon-sequencing. The data can then be processed and biallelic mutations are confirmed in all cases.

### Modified Insects

[0833] In some embodiments, the CRISPR-Cas systems described herein can be used to modify one or more polynucleotides in an arthropod such as an insect. In some embodiments, the modification can improve or reduce the insect's resistance to a pesticide or other environmental chemical, improve an insect's resistance to a disease or disease causing organism, and/or can reduce an insect's ability to be a host or vector for a disease causing organism or pathogen. Other beneficial modifications that can be introduced by the CRISPR-Cas systems described herein into an insect will be appreciated in view of this disclosure.

[0834] Exemplary insects for modification can include, but are not limited to, any of those in the following orders: Apocrita (includes ants, bees, and wasps), Coleoptera (includes beetles and weevils), Lepidoptera (includes butterflies and moths), Trichoptera (includes caddisflies), Blattodea (includes cockroaches), Orthoptera (includes crickets, grasshoppers, and katydids), Diplura (includes diplurans), Odonata (includes dragonflies and damselflies), Dermaptera (includes earwigs), Siphonaptera (includes fleas), Diptera (includes flies), Mantophasmotodea (includes gladiator bugs), Hemiptera (includes hemipterans), Homoptera (includes momopterans), Grylloblatodea (includes icebugs), Neuroptera (includes lacewings), Phthiraptera (includes lice), Manotodea (includes mantids), Ephemoptera (includes mayflies), Meglaoptera (includes megalopterans), Psoceoptera (includes Psocids), Mecoptera (includes scorpionflies), Plecoptera (includes stoneflies), Strepsiptera (includes strepsipterans), Isoptera (includes termites), Thysanoptera (includes thrips), Herteroptera (includes true bugs, e.g. assassin bugs, bat bugs, bedbugs, lace bugs, stink bugs, etc.) Embioptera (includes webspinners), Phasmida (includes walkingsticks), and Apterygota (includes apterygote).

### Modified Fungi

[0835] In some embodiments, the CRISPR-Cas systems described herein can be used to modify one or more polynucleotides in a fungus. In particular embodiments, the CRISPR-Cas system described herein can be used for genome editing of yeast cells. Methods for transforming yeast cells which can be used to introduce polynucleotides encoding the CRISPR-Cas system components are well known to the artisan and are reviewed by Kawai et al., 2010, Bioeng Bugs. 2010 November-December; 1(6): 395-403). Non-limiting examples include transformation of yeast cells by lithium acetate treatment (which may further include carrier DNA and PEG treatment), bombardment or by electroporation. Other methods of delivering the CRISPR-Cas systems are described elsewhere herein.

[0836] As used herein, a “fungal cell” refers to any type of eukaryotic cell within the kingdom of fungi. Phyla within the kingdom of fungi include Ascomycota, Basidiomycota, Blastocladiomycota, Chytridiomycota, Glomeromycota, Microsporidia, and Neocallimastigomycota. Fungal cells may include yeasts, molds, and filamentous fungi. In some embodiments, the fungal cell is a yeast cell.

[0837] As used herein, the term “yeast cell” refers to any fungal cell within the phyla Ascomycota and Basidiomycota. Yeast cells may include budding yeast cells, fission yeast cells, and mold cells. Without being limited to these organisms, many types of yeast used in laboratory and industrial settings are part of the phylum Ascomycota. In some embodiments, the yeast cell is an S. cerevisiae, Kluyveromyces marxianus, or Issatchenkia orientalis cell. Other yeast cells may include without limitation Candida spp. (e.g., Candida albicans), Yarrowia spp. (e.g., Yarrowia lipolytica), Pichia spp. (e.g., Pichia pastoris), Kluyveromyces spp. (e.g., Kluyveromyces lactis and Kluyveromyces marxianus), Neurospora spp. (e.g., Neurospora crassa), Fusarium spp. (e.g., Fusarium oxysporum), and Issatchenkia spp. (e.g., Issatchenkia orientalis, a.k.a. Pichia kudriavzevii and Candida acidothermophilum). In some embodiments, the fungal cell is a filamentous fungal cell. As used herein, the term “filamentous fungal cell” refers to any type of fungal cell that grows in filaments, i.e., hyphae or mycelia. Examples of filamentous fungal cells may include without limitation Aspergillus spp. (e.g., Aspergillus niger), Trichoderma spp. (e.g., Trichoderma reesei), Rhizopus spp. (e.g., Rhizopus oryzae), and Mortierella spp. (e.g., Mortierella isabellina).

[0838] In some embodiments, the fungal cell modified is an industrial strain. As used herein, “industrial strain” refers to any strain of fungal cell used in or isolated from an industrial process, e.g., production of a product on a commercial or industrial scale. Industrial strain may refer to a fungal species that is typically used in an industrial process, or it may refer to an isolate of a fungal species that may be also used for non-industrial purposes (e.g., laboratory research). Examples of industrial processes may include fermentation (e.g., in production of food or beverage products), distillation, biofuel production, production of a compound, and production of a polypeptide. Examples of industrial strains may include, without limitation, JAY270 and ATCC4124.

[0839] In some embodiments, the fungal cell modified is a polyploid cell. As used herein, a “polyploid” cell may refer to any cell whose genome is present in more than one copy. A polyploid cell may refer to a type of cell that is naturally found in a polyploid state, or it may refer to a cell that has been induced to exist in a polyploid state (e.g., through specific regulation, alteration, inactivation, activation, or modification of meiosis, cytokinesis, or DNA replication). A polyploid cell may refer to a cell whose entire genome is polyploid, or it may refer to a cell that is polyploid in a particular genomic locus of interest. Without wishing to be bound to theory, it is thought that the abundance of gRNA may more often be a rate-limiting component in genome engineering of polyploid cells than in haploid cells, and thus the methods using the CRISPR-Cas system described herein may take advantage of using a certain fungal cell type.

[0840] In some embodiments, the fungal cell modified is a diploid cell. As used herein, a “diploid” cell may refer to any cell whose genome is present in two copies. A diploid cell may refer to a type of cell that is naturally found in a diploid state, or it may refer to a cell that has been induced to exist in a diploid state (e.g., through specific regulation, alteration, inactivation, activation, or modification of meiosis, cytokinesis, or DNA replication). For example, the S. cerevisiae strain S228C may be maintained in a haploid or diploid state. A diploid cell may refer to a cell whose entire genome is diploid, or it may refer to a cell that is diploid in a particular genomic locus of interest. In some embodiments, the fungal cell is a haploid cell. As used herein, a “haploid” cell may refer to any cell whose genome is present in one copy. A haploid cell may refer to a type of cell that is naturally found in a haploid state, or it may refer to a cell that has been induced to exist in a haploid state (e.g., through specific regulation, alteration, inactivation, activation, or modification of meiosis, cytokinesis, or DNA replication). For example, the S. cerevisiae strain S228C may be maintained in a haploid or diploid state. A haploid cell may refer to a cell whose entire genome is haploid, or it may refer to a cell that is haploid in a particular genomic locus of interest.

### Modifying Yeast for Biofuel Production

[0841] The CRISPR-Cas systems described herein can be used bioethanol production by recombinant micro-organisms, such as yeast. to generate biofuel or biopolymers from fermentable sugars and optionally to be able to degrade plant-derived lignocellulose derived from agricultural waste as a source of fermentable sugars. In some embodiments, a CRISPR-Cas system, such as a CRISPR-Cas complex, can be used to introduce foreign genes required for biofuel production into micro-organisms and/or to modify endogenous genes why may interfere with the biofuel synthesis. In some embodiments, a method can include introducing into a micro-organism, such as a yeast, one or more nucleotide sequence encoding enzymes involved in the conversion of pyruvate to ethanol or another product of interest, where the one or more nucleotide sequences can be introduced using a CRISPR-Cas system described herein. In some embodiments, the methods ensure the introduction of one or more polynucleotides that encode enzyme(s) which allows the micro-organism to degrade cellulose, such as a cellulase, where the introduction of the one or more polynucleotides is facilitated by a CRISPR-Cas system described herein. In yet further embodiments, the CRISPR-Cas system described herein is used to modify endogenous metabolic pathways which compete with the biofuel production pathway.

[0842] In some embodiments, the method can include introducing at least one heterologous nucleic acid or increase expression of at least one endogenous nucleic acid encoding a plant cell wall degrading enzyme, such that said micro-organism is capable of expressing said nucleic acid and of producing and secreting said plant cell wall degrading enzyme;
[0843] introducing at least one heterologous nucleic acid or increase expression of at least one endogenous nucleic acid encoding an enzyme that converts pyruvate to acetaldehyde optionally combined with at least one heterologous nucleic acid encoding an enzyme that converts acetaldehyde to ethanol such that said host cell is capable of expressing said nucleic acid; and/or
[0844] modifying at least one nucleic acid encoding for an enzyme in a metabolic pathway in said host cell, wherein said pathway produces a metabolite other than acetaldehyde from pyruvate or ethanol from acetaldehyde, and wherein said modification results in a reduced production of said metabolite, or to introduce at least one nucleic acid encoding for an inhibitor of said enzyme.

[0845] The CRISPR-Cas system described herein can be used to generate modified yeast having improved xylose or cellobiose utilization. Thus, described herein are modified yeast having improved xylose or cellobiose utilization.

[0846] In particular embodiments, the CRISPR-Cas system described herein may be applied to select for improved xylose or cellobiose utilizing yeast strains. Error-prone PCR can be used to amplify one (or more) genes involved in the xylose utilization or cellobiose utilization pathways. Examples of genes involved in xylose utilization pathways and cellobiose utilization pathways may include, without limitation, those described in Ha, S. J., et al. (2011) Proc. Natl. Acad. Sci. USA 108(2):504-9 and Galazka, J. M., et al. (2010) Science 330(6000):84-6. Resulting libraries of double-stranded DNA molecules, each comprising a random mutation in such a selected gene could be co-transformed with the components of the CRISPR-Cas system into a yeast strain (for instance S288C) and strains can be selected with enhanced xylose or cellobiose utilization capacity, as described in WO2015138855.

[0847] The CRISPR-Cas systems described herein can be used to generate improved yeasts strains for use in isoprenoid biosynthesis.

[0848] Tadas Jakočiūnas et al. described the successful application of a multiplex CRISPR/Cas9 system for genome engineering of up to 5 different genomic loci in one transformation step in baker's yeast Saccharomyces cerevisiae (Metabolic Engineering Volume 28, March 2015, Pages 213-222) resulting in strains with high mevalonate production, a key intermediate for the industrially important isoprenoid biosynthesis pathway. In particular embodiments, the small Type II-D CRISPR-Cas systems described herein may be applied in a multiplex genome engineering method as described herein for identifying additional high producing yeast strains for use in isoprenoid synthesis.

[0849] The small Type II-D CRISPR-Cas systems described herein can be used to generate lactic acid producing yeasts strains.

[0850] In another embodiment, successful application of a multiplex CRISPR-Cas system is encompassed. In analogy with Vratislav Stovicek et al. (Metabolic Engineering Communications, Volume 2, December 2015, Pages 13-22), improved lactic acid-producing strains can be designed and obtained in a single transformation event. In a particular embodiment, the small Type II-D CRISPR-Cas system described herein is used for simultaneously inserting the heterologous lactate dehydrogenase gene and disruption of two endogenous genes PDC1 and PDC5 genes.

### Modified Microorganisms

[0851] The CRISPR-Cas systems described herein can be expressed in and can be used to generate modified micro-organisms.

[0852] In certain embodiments, the modified micro-organisms can be capable of fatty acid production. In particular embodiments, the CRISPR-Cas systems described herein can be used to generate genetically engineered micro-organisms capable of the production of fatty esters, such as fatty acid methyl esters (“FAME”) and fatty acid ethyl esters (“FAEE”), In some embodiments, host cells can be engineered to produce fatty esters from a carbon source, such as an alcohol, present in the medium, by expression or overexpression of a gene encoding a thioesterase, a gene encoding an acyl-CoA synthase, and a gene encoding an ester synthase. Accordingly, the methods provided herein are used to modify a micro-organisms so as to overexpress or introduce a thioesterase gene, a gene encoding an acyl-CoA synthase, and a gene encoding an ester synthase. In particular embodiments, the thioesterase gene is selected from tesA, ′tesA, tesB, fatB, fatB2, fatB3, fatA1, or fatA. In particular embodiments, the gene encoding an acyl-CoA synthase is selected from fadDJadK, BH3103, pfl-4354, EAV15023, fadD1, fadD2, RPC_4074, fadDD35, fadDD22, faa39, or an identified gene encoding an enzyme having the same properties. In particular embodiments, the gene encoding an ester synthase is a gene encoding a synthase/acyl-CoA:diacylglycerl acyltransferase from Simmondsia chinensis, Acinetobacter sp. ADP, Alcanivorax borkumensis, Pseudomonas aeruginosa, Fundibacter jadensis, Arabidopsis thaliana, or Alkaligenes eutrophus, or a variant thereof.

[0853] In some embodiments, the CRISPR-Cas systems described herein are used to modify a microorganism such that the modified microorganism has decreased expression of at least one of a gene encoding an acyl-CoA dehydrogenase, a gene encoding an outer membrane protein receptor, and a gene encoding a transcriptional regulator of fatty acid biosynthesis. In particular embodiments one or more of these genes is inactivated, such as by introduction of a mutation. In particular embodiments, the gene encoding an acyl-CoA dehydrogenase is fadE. In particular embodiments, the gene encoding a transcriptional regulator of fatty acid biosynthesis encodes a DNA transcription repressor, for example, fabR.

[0854] In some embodiments, the CRISPR-Cas systems described herein are used to modify a microorganism such that the modified microorganism has reduced expression of at least one of a gene encoding a pyruvate formate lyase, a gene encoding a lactate dehydrogenase, or both. In particular embodiments, the gene encoding a pyruvate formate lyase is pflB. In particular embodiments, the gene encoding a lactate dehydrogenase is IdhA. In particular embodiments, one or more of these genes is inactivated, such as by introduction of a mutation therein.

[0855] In particular embodiments, the micro-organism modified is selected from the genus Escherichia, Bacillus, Lactobacillus, Rhodococcus, Synechococcus, Synechoystis, Pseudomonas, Aspergillus, Trichoderma, Neurospora, Fusarium, Humicola, Rhizomucor, Kluyveromyces, Pichia, Mucor, Myceliophtora, Penicillium, Phanerochaete, Pleurotus, Trametes, Chrysosporium, Saccharomyces, Stenotrophamonas, Schizosaccharomyces, Yarrowia, or Streptomyces.

[0856] The CRISPR-Cas system described herein can be used to generate modified micro-organisms capable of organic acid production. Thus, described herein are modified micro-organisms capable of producing organic acids.

[0857] The CRISPR-Cas systems provided herein are further used to engineer micro-organisms capable of organic acid production, more particularly from pentose or hexose sugars. In particular embodiments, the methods comprise introducing into a micro-organism an exogenous LDH gene. In particular embodiments, the organic acid production in said micro-organisms is additionally or alternatively increased by using the CRISPR-Cas systems described herein to inactivate endogenous genes encoding proteins involved in an endogenous metabolic pathway which produces a metabolite other than the organic acid of interest and/or wherein the endogenous metabolic pathway consumes the organic acid. In particular embodiments, the modification ensures that the production of the metabolite other than the organic acid of interest is reduced. In some embodiments, the CRISPR-Cas systems described herein can introduce at least one engineered gene deletion and/or inactivation of an endogenous pathway in which the organic acid is consumed or a gene encoding a product involved in an endogenous pathway which produces a metabolite other than the organic acid of interest. In particular embodiments, the CRISPR-Cas systems described herein introduce at least one engineered gene deletion or inactivation is in one or more gene encoding an enzyme selected from the group consisting of pyruvate decarboxylase (pdc), fumarate reductase, alcohol dehydrogenase (adh), acetaldehyde dehydrogenase, phosphoenolpyruvate carboxylase (ppc), D-lactate dehydrogenase (d-ldh), L-lactate dehydrogenase (l-ldh), lactate 2-monooxygenase. In further embodiments the at least one engineered gene deletion and/or inactivation is in an endogenous gene encoding pyruvate decarboxylase (pdc).

[0858] In further embodiments, the CRISPR-Cas system is used to modify a micro-organism to produce lactic acid by introducing at least one engineered gene deletion and/or inactivation, which can be an endogenous gene encoding lactate dehydrogenase. In some embodiments, the micro-organism comprises at least one engineered gene deletion or inactivation of an endogenous gene encoding a cytochrome-dependent lactate dehydrogenase, such as a cytochrome B2-dependent L-lactate dehydrogenase.

[0859] The following additional references can be adapted and applied though the CRISPR-Cas systems described herein to produce various modified micro-organisms: PCT Publications WO2016/099887; WO2016/025131; WO2016/073433; WO2017/066175; WO2017/100158; WO 2017/105991; WO2017/106414; WO2016/100272; WO2016/100571; WO 2016/100568; WO 2016/100562; and WO 2017/019867.

### Kits

[0860] Also described herein are kits that contain one or more of the one or more of the polypeptides, polynucleotides, vectors, cells, or other components described herein and combinations thereof and pharmaceutical formulations described herein. In certain embodiments, one or more of the polypeptides, polynucleotides, vectors, cells, and combinations thereof described herein can be presented as a combination kit. As used herein, the terms “combination kit” or “kit of parts” refers to the compounds, or formulations and additional components that are used to package, screen, test, sell, market, deliver, and/or administer the combination of elements or a single element, such as the active ingredient, contained therein. Such additional components include but are not limited to, packaging, syringes, blister packages, bottles, and the like. The combination kit can contain one or more of the components (e.g., one or more of the one or more of the polypeptides, polynucleotides, vectors, cells, and combinations thereof) or formulation thereof can be provided in a single formulation (e.g., a liquid, lyophilized powder, etc.), or in separate formulations. The separate components or formulations can be contained in a single package or in separate packages within the kit. The kit can also include instructions in a tangible medium of expression that can contain information and/or directions regarding the content of the components and/or formulations contained therein, safety information regarding the content of the components(s) and/or formulation(s) contained therein, information regarding the amounts, dosages, indications for use, screening methods, component design recommendations and/or information, recommended treatment regimen(s) for the components(s) and/or formulations contained therein. As used herein, “tangible medium of expression” refers to a medium that is physically tangible or accessible and is not a mere abstract thought or an unrecorded spoken word. “Tangible medium of expression” includes, but is not limited to, words on a cellulosic or plastic material, or data stored in a suitable computer readable memory form. The data can be stored on a unit device, such as a flash memory drive or CD-ROM or on a server that can be accessed by a user via, e.g., a web interface. In some embodiments, the kit includes instructions in one or more languages, for example in more than one language. The instructions may be specific to the applications and methods described herein.

[0861] In some embodiments, the kit comprises a vector system as taught herein or one or more of the components of the system or complex as taught herein, such as crRNAs and/or Cas protein or Cas protein encoding mRNA, and instructions for using the kit. Elements may be provided individually or in combinations, and may be provided in any suitable container, such as a vial, a bottle, or a tube. In some embodiments, a kit comprises one or more reagents for use in a process utilizing one or more of the elements described herein. Reagents may be provided in any suitable container. For example, a kit may provide one or more reaction or storage buffers. Reagents may be provided in a form that is usable in a particular assay, or in a form that requires addition of one or more other components before use (e.g., in concentrate or lyophilized form). A buffer can be any buffer, including but not limited to a sodium carbonate buffer, a sodium bicarbonate buffer, a borate buffer, a Tris buffer, a MOPS buffer, a HEPES buffer, and combinations thereof. In some embodiments, the buffer is alkaline. In some embodiments, the buffer has a pH from about 7 to about 10. In some embodiments, the kit comprises one or more oligonucleotides corresponding to a guide sequence for insertion into a vector so as to operably link the guide or crRNA sequence and a regulatory element. In some embodiments, the kit comprises a homologous recombination template polynucleotide. In some embodiments, the kit comprises one or more of the vectors and/or one or more of the polynucleotides described herein. The kit may advantageously allow to provide all elements of the systems of the invention. METHODS OF USING THE CRISPR-CAS SYSTEMS

[0862] The CRISPR-Cas systems and/or components thereof (e.g., a small Type II-D Cas protein or variant thereof) can be used to modify a polynucleotide in vitro, in vivo, in situ, and/or ex vivo. Such polynucleotide modifications and thus the methods of generating such modifications have various applications in viral, microorganism, plants, animals, and humans. Non-limiting exemplary methods and applications of the CRISPR-Cas systems of the present disclosure are further described in detail below and elsewhere herein. In general, the CRIRSPR-Cas system that includes one or more a small Type II-D Cas proteins or variants thereof can be guided to a target polynucleotide by one or more guide strand. As previously described, a small Type II-D Cas protein or variant thereof can directly modify a target polynucleotide (DNA or RNA) at or within proximity to the one or more positions dictated by the target sequence of the guide molecule(s) within the CRISPR-Cas system. Such modifications have various uses and applications as are described by the non-limiting examples herein and will be appreciated in view of the description herein. In some embodiments, the CRISPR-Cas system or complex of the present invention, when introduced into a cell, creates a break (e.g., a single or a double strand break) or nicks in the genome sequence. For example, the method can be used to cleave a disease gene in a cell. The break or nick created by the CRISPR complex can be repaired by an endogenous repair processes such as the error prone non-homologous end joining (NHEJ) pathway or the high fidelity homology-directed repair (HDR). These and/or other methods of repair such as those employed when a technique such as those that facilitate polynucleotide repair during prime editing (see e.g., Schene et al. 2020. Nat. Commun. 11:5352) can be induced or activated by one or more activities of the CRISPR-Cas system or complex of the present invention. During these repair processes, an exogenous polynucleotide template can be introduced into or be used to modify the genome sequence. In some methods, the HDR process is used modify genome sequence. As described elsewhere herein, in some embodiments, the CRISPR-Cas system and/or one or more components thereof is configured to promote one or more DNA repair pathways.

[0863] In some embodiments, the upstream and downstream sequences in the exogenous polynucleotide template or donor sequence are selected to promote recombination between the chromosomal sequence of interest and the donor polynucleotide. The upstream sequence is a nucleic acid sequence that shares sequence similarity with the genome sequence upstream of the targeted site for integration. Similarly, the downstream sequence is a nucleic acid sequence that shares sequence similarity with the chromosomal sequence downstream of the targeted site of integration. The upstream and downstream sequences in the exogenous polynucleotide template can have 75%, 80%, 85%, 90%, 95%, or 100% sequence identity with the targeted genome sequence. Preferably, the upstream and downstream sequences in the exogenous polynucleotide template have about 95%, 96%, 97%, 98%, 99%, or 100% sequence identity with the targeted genome sequence. In some methods, the upstream and downstream sequences in the exogenous polynucleotide template have about 99% or 100% sequence identity with the targeted genome sequence. An upstream or downstream sequence may comprise from about 20 bp to about 2500 bp, for example, about 50, 100, 200, 300, 400, 500, 600, 700, 800, 900, 1000, 1100, 1200, 1300, 1400, 1500, 1600, 1700, 1800, 1900, 2000, 2100, 2200, 2300, 2400, or 2500 bp. In some methods, the exemplary upstream or downstream sequence have about 200 bp to about 2000 bp, about 600 bp to about 1000 bp, or more particularly about 700 bp to about 1000 bp.

[0864] The double strand break or single strand break in one of the strands advantageously should be sufficiently close to target position such that correction occurs. In an embodiment, the distance is not more than 50, 100, 200, 300, 350 or 400 nucleotides. While not wishing to be bound by theory, it is believed that the break should be sufficiently close to target position such that the break is within the region that is subject to exonuclease-mediated removal during end resection. If the distance between the target position and a break is too great, the mutation may not be included in the end resection and, therefore, may not be corrected, as the template nucleic acid sequence may only be used to correct sequence within the end resection region.

[0865] In an embodiment, in which a guide RNA and a Cas or an ortholog or homolog thereof, preferably a Cas nuclease induce a double strand break for the purpose of inducing HDR-mediated correction, the cleavage site is between 0-200 bp (e.g., 0 to 175, 0 to 150, 0 to 125, 0 to 100, 0 to 75, 0 to 50, 0 to 25, 25 to 200, 25 to 175, 25 to 150, 25 to 125, 25 to 100, 25 to 75, 25 to 50, 50 to 200, 50 to 175, 50 to 150, 50 to 125, 50 to 100, 50 to 75, 75 to 200, 75 to 175, 75 to 150, 75 to 125, 75 to 100 bp) away from the target position. In an embodiment, the cleavage site is between 0-100 bp (e.g., 0 to 75, 0 to 50, 0 to 25, 25 to 100, 25 to 75, 25 to 50, 50 to 100, 50 to 75 or 75 to 100 bp) away from the target position. In a further embodiment, two or more guide RNAs complexing with Cas or an ortholog or homolog thereof may be used to induce multiplexed breaks for purpose of inducing DNA repair.

[0866] In some embodiments, the double strand break or single strand break in one of the strands advantageously is sufficiently close to a target position such that correction occurs. In an embodiment, this distance is not more than 50, 100, 200, 300, 350 or 400 nucleotides. While not wishing to be bound by theory, it is believed that the break should be sufficiently close to target position such that the break is within the region that is subject to exonuclease-mediated removal during end resection. If the distance between the target position and a break is too great, the mutation may not be included in the end resection and, therefore, may not be corrected, as the template nucleic acid sequence may only be used to correct sequence within the end resection region.

[0867] In an embodiment, in which a guide RNA and a Cas or an ortholog or homolog thereof, preferably a Cas nuclease induce a double strand break for the purpose of inducing HDR-mediated correction, the cleavage site is between 0-200 bp (e.g., 0 to 175, 0 to 150, 0 to 125, 0 to 100, 0 to 75, 0 to 50, 0 to 25, 25 to 200, 25 to 175, 25 to 150, 25 to 125, 25 to 100, 25 to 75, 25 to 50, 50 to 200, 50 to 175, 50 to 150, 50 to 125, 50 to 100, 50 to 75, 75 to 200, 75 to 175, 75 to 150, 75 to 125, 75 to 100 bp) away from the target position. In an embodiment, the cleavage site is between 0-100 bp (e.g., 0 to 75, 0 to 50, 0 to 25, 25 to 100, 25 to 75, 25 to 50, 50 to 100, 50 to 75 or 75 to 100 bp) away from the target position. In a further embodiment, two or more guide RNAs complexing with Cas or an ortholog or homolog thereof, may be used to induce multiplexed breaks for purpose of inducing DNA repair.

[0868] In some embodiments, the homology arm extends at least as far as the region in which end resection may occur, e.g., in order to allow the resected single stranded overhang to find a complementary region within the donor template. The overall length could be limited by parameters such as plasmid size or viral packaging limits. In an embodiment, a homology arm may not extend into repeated elements. Exemplary homology arm lengths include a least 50, 100, 250, 500, 750 or 1000 nucleotides.

[0869] Target position, as used herein, refers to a site on a target nucleic acid or target gene (e.g., the chromosome) that is modified by a Cas or an ortholog or homolog thereof, preferably Cas molecule-dependent process. For example, the target position can be a modified small Type II-D Cas molecule cleavage of the target nucleic acid and template nucleic acid directed modification, e.g., correction, of the target position. In an embodiment, a target position can be a site between two nucleotides, e.g., adjacent nucleotides, on the target nucleic acid into which one or more nucleotides is added. The target position may comprise one or more nucleotides that are altered, e.g., corrected, by a template nucleic acid. In an embodiment, the target position is within a target sequence (e.g., the sequence to which the guide RNA binds). In an embodiment, a target position is upstream or downstream of a target sequence (e.g., the sequence to which the guide RNA binds).

[0870] In an embodiment, the target nucleic acid is modified to have some or all of the sequence of the template and/or donor nucleic acid, typically at or near cleavage site(s). In an embodiment, the template and/or donor nucleic acid is single stranded. In an alternate embodiment, the template and/or donor nucleic acid is double stranded. In an embodiment, the template and/or donor nucleic acid is DNA, e.g., double stranded DNA. In an alternate embodiment, the template or donor nucleic acid is single stranded DNA.

[0871] In an embodiment, the template or donor nucleic acid alters the structure of the target position by participating in homologous recombination. In an embodiment, the template or donor nucleic acid alters the sequence of the target position. In an embodiment, the template or donor nucleic acid results in the incorporation of a modified, or non-naturally occurring base into the target nucleic acid.

[0872] The template or donor sequence may undergo a breakage mediated or catalyzed recombination with the target sequence. In an embodiment, the template or donor nucleic acid may include sequence that corresponds to a site on the target sequence that is cleaved by a Cas mediated cleavage event. In an embodiment, the template or donor nucleic acid may include sequence that corresponds to both, a first site on the target sequence that is cleaved in a first Cas mediated event, and a second site on the target sequence that is cleaved in a second Cas mediated event.

[0873] In some embodiments, the CRISRP-Cas systems and/or complexes thereof can modify a cell state, type, or status by modifying one or more polynucleotides in a cell. In certain embodiments CRISPR-Cas in a complex with crRNA is activated upon binding to target RNA and subsequently cleaves any nearby ssDNA targets (i.e. “collateral” or “bystander” effects). CRISPR-Cas, once primed by the cognate target, can cleave other (non-complementary) DNA molecules. Such promiscuous RNA cleavage could potentially cause cellular toxicity, or otherwise affect cellular physiology or cell status. Such collateral activity can also be harnessed in assays, which are described in greater detail elsewhere herein.

[0874] Accordingly, in certain embodiments, the non-naturally occurring or engineered composition, vector system, or delivery systems as described herein are used for or are for use in induction of cell dormancy. In certain embodiments, the non-naturally occurring or engineered composition, vector system, or delivery systems as described herein are used for or are for use in induction of cell cycle arrest. In certain embodiments, the non-naturally occurring or engineered composition, vector system, or delivery systems as described herein are used for or are for use in reduction of cell growth and/or cell proliferation, In certain embodiments, the non-naturally occurring or engineered composition, vector system, or delivery systems as described herein are used for or are for use in induction of cell anergy. In certain embodiments, the non-naturally occurring or engineered composition, vector system, or delivery systems as described herein are used for or are for use in induction of cell apoptosis. In certain embodiments, the non-naturally occurring or engineered composition, vector system, or delivery systems as described herein are used for or are for use in induction of cell necrosis. In certain embodiments, the non-naturally occurring or engineered composition, vector system, or delivery systems as described herein are used for or are for use in induction of cell death. In certain embodiments, the non-naturally occurring or engineered composition, vector system, or delivery systems as described herein are used for or are for use in induction of programmed cell death.

### CRISPR-Cas System Therapeutic Uses and Methods of Treatment

[0875] Provided herein are methods of diagnosing, prognosing, treating, and/or preventing a disease, state, or condition in or of a subject. Generally, the methods of diagnosing, prognosing, treating, and/or preventing a disease, state, or condition in or of a subject can include modifying a polynucleotide in a subject or cell thereof using a CRISPR-Cas system or component thereof described herein and/or include detecting a diseased or healthy polynucleotide in a subject or cell thereof using a CRISPR-Cas system or component thereof described herein. In some embodiments, the method of treatment or prevention can include using a CRISPR-Cas system or component thereof to modify a polynucleotide of an infectious organism (e.g., bacterial or virus) within a subject or cell thereof. In some embodiments, the method of treatment or prevention can include using a CRISPR-Cas system or component thereof to modify a polynucleotide of an infectious organism or symbiotic organism within a subject. The CRISPR-Cas systems and components thereof can be used to develop models of diseases, states, or conditions. The CRISPR-Cas systems and components thereof can be used to detect a disease state or correction thereof, such as by a method of treatment or prevention described herein. The CRISPR-Cas systems and components thereof can be used to screen and select cells that can be used, for example, as treatments or preventions described herein. The CRISPR-Cas systems and components thereof can be used to develop biologically active agents that can be used to modify one or more biologic functions or activities in a subject or a cell thereof.

[0876] In general, the method can include delivering a CRISPR-Cas System and/or component thereof to a subject or cell thereof, or to an infectious or symbiotic organism by a suitable delivery technique and/or composition. Once administered the components can operate as described elsewhere herein to elicit a nucleic acid modification event. In some embodiments, the nucleic acid modification event can occur at the genomic, epigenomic, and/or transcriptomic level. DNA and/or RNA cleavage, gene activation, and/or gene deactivation can occur. Additional features, uses, and advantages are described in greater detail below. On the basis of this concept, several variations are appropriate to elicit a genomic locus event, including DNA cleavage, gene activation, or gene deactivation. Using the provided compositions and components thereof, the person skilled in the art can advantageously and specifically target single or multiple loci with the same or different functional domains to elicit one or more genomic locus events. In addition to treating and/or preventing a disease in a subject, the compositions may be applied in a wide variety of methods for screening in libraries in cells and functional modeling in vivo (e.g. gene activation of lincRNA and identification of function; gain-of-function modeling; loss-of-function modeling; the use the compositions of the invention to establish cell lines and transgenic animals for optimization and screening purposes).

[0877] The CRISPR-Cas systems and components thereof described elsewhere herein can be used to treat and/or prevent a disease, such as a genetic and/or epigenetic disease, in a subject. The CRISPR-Cas systems and components thereof described elsewhere herein can be used to treat and/or prevent genetic infectious diseases in a subject, such as bacterial infections, viral infections, fungal infections, parasite infections, and combinations thereof. The CRISPR-Cas systems and components thereof described elsewhere herein can be used to modify the composition or profile of a microbiome in a subject, which can in turn modify the health status of the subject. The CRISPR-Cas systems described herein can be used to modify cells ex vivo, which can then be administered to the subject whereby the modified cells can treat or prevent a disease or symptom thereof. This is also referred to in some contexts as adoptive therapy. The CRISPR-Cas systems described herein can be used to treat mitochondrial diseases, where the mitochondrial disease etiology involves a mutation in the mitochondrial DNA.

[0878] Also provided is a method of treating a subject, e.g., a subject in need thereof, comprising inducing gene editing by transforming the subject with the polynucleotide encoding one or more components of the CRISPR-Cas system or complex or any of polynucleotides or vectors described herein and administering them to the subject. A suitable repair template may also be provided, for example delivered, by a vector comprising said repair template. Also provided is a method of treating a subject, e.g., a subject in need thereof, comprising inducing transcriptional activation or repression of multiple target gene loci by transforming the subject with the polynucleotides or vectors described herein, wherein said polynucleotide or vector encodes or comprises one or more components of CRISPR-Cas system, complex or component thereof comprising multiple Cas effectors. Where any treatment is occurring ex vivo, for example in a cell culture, then it will be appreciated that the term ‘subject’ may be replaced by the phrase “cell or cell culture.”

[0879] Also provided is a method of treating a subject, e.g., a subject in need thereof, comprising inducing gene editing by transforming the subject with the Cas effector(s), advantageously encoding and expressing in vivo the remaining portions of the CRISPR-Cas system (e.g., RNA, guides). A suitable repair template may also be provided, for example delivered by a vector comprising said repair template. Also provided is a method of treating a subject, e.g., a subject in need thereof, comprising inducing transcriptional activation or repression by transforming the subject with the Cas effector(s) advantageously encoding and expressing in vivo the remaining portions of the CRISPR-Cas system (e.g., RNA, guides); advantageously in some embodiments the CRISPR enzyme is a catalytically inactive Cas effector and includes one or more associated functional domains. Where any treatment is occurring ex vivo, for example in a cell culture, then it will be appreciated that the term ‘subject’ may be replaced by the phrase “cell or cell culture.”

[0880] One or more components of the nucleic acid targeting system described herein (e.g., a CRISPR-Cas system) can be included in a composition, such as a pharmaceutical composition, and administered to a host individually or collectively. Alternatively, these components may be provided in a single composition for administration to a host. Administration to a host may be performed via viral vectors known to the skilled person or described herein for delivery to a host (e.g., lentiviral vector, adenoviral vector, AAV vector). As explained herein, use of different selection markers (e.g., for lentiviral gRNA selection) and concentration of gRNA (e.g. dependent on whether multiple gRNAs are used) may be advantageous for eliciting an improved effect.

[0881] Thus, also described herein are methods of inducing one or more polynucleotide modifications in a eukaryotic or prokaryotic cell or component thereof (e.g., a mitochondria) of a subject, infectious organism, and/or organism of the microbiome of the subject. The modification can include the introduction, deletion, or substitution of one or more nucleotides at a target sequence of a polynucleotide of one or more cell(s). The modification can occur in vitro, ex vivo, in situ, or in vivo.

[0882] In some embodiments, the method of treating or inhibiting a condition or a disease caused by one or more mutations in a genomic locus in a eukaryotic organism or a non-human organism can include manipulation of a target sequence within a coding, non-coding or regulatory element of said genomic locus in a target sequence in a subject or a non-human subject in need thereof comprising modifying the subject or a non-human subject by manipulation of the target sequence and wherein the condition or disease is susceptible to treatment or inhibition by manipulation of the target sequence including providing treatment comprising delivering a composition comprising the particle delivery system or the delivery system or the virus particle of any one of the above embodiment or the cell of any one of the above embodiment.

[0883] Also provided herein is the use of the particle delivery system or the delivery system or the virus particle of any one of the above embodiment or the cell of any one of the above embodiment in ex vivo or in vivo gene or genome editing; or for use in in vitro, ex vivo, or in vivo gene therapy. Also provided herein are particle delivery systems, non-viral delivery systems, and/or the virus particle of any one of the above embodiments or the cell of any one of the above embodiments used in the manufacture of a medicament for in vitro, ex vivo or in vivo gene or genome editing or for use in in vitro, ex vivo or in vivo gene therapy or for use in a method of modifying an organism or a non-human organism by manipulation of a target sequence in a genomic locus associated with a disease or in a method of treating or inhibiting a condition or disease caused by one or more mutations in a genomic locus in a eukaryotic organism or a non-human organism.

[0884] In some embodiments, polynucleotide modification can include the introduction, deletion, or substitution of 1-75 nucleotides at each target sequence of said polynucleotide of said cell(s). The modification can include the introduction, deletion, or substitution of 1, 2, 3, 4, 5, 6, 7, 8, 9, 10, 11, 12, 13, 14, 15, 16, 17, 18, 19, 20, 21, 22, 23, 24, 25, 26, 27, 28, 29, 30, 31, 32, 33, 34, 35, 36, 37, 38, 39, 40, 41, 42, 43, 44, 45, 46, 47, 48, 49, 50, 51, 52, 53, 54, 55, 56, 57, 58, 59, 60, 61, 62, 63, 64, 65, 66, 67, 68, 69, 70, 71, 72, 73, 74, 75, 76, 77, 78, 79, 80, 81, 82, 83, 84, 85, 86, 87, 88, 89, 90, 91, 92, 93, 94, 95, 96, 97, 98, 99, to/or 100 nucleotides at each target sequence. The modification can include the introduction, deletion, or substitution of 5, 6, 7, 8, 9, 10, 11, 12, 13, 14, 15, 16, 17, 18, 19, 20, 21, 22, 23, 24, 25, 26, 27, 28, 29, 30, 31, 32, 33, 34, 35, 36, 37, 38, 39, 40, 41, 42, 43, 44, 45, 46, 47, 48, 49, 50, 51, 52, 53, 54, 55, 56, 57, 58, 59, 60, 61, 62, 63, 64, 65, 66, 67, 68, 69, 70, 71, 72, 73, 74, 75, 76, 77, 78, 79, 80, 81, 82, 83, 84, 85, 86, 87, 88, 89, 90, 91, 92, 93, 94, 95, 96, 97, 98, 99, to/or 100 nucleotides at each target sequence of said cell(s). The modification can include the introduction, deletion, or substitution of 10, 11, 12, 13, 14, 15, 16, 17, 18, 19, 20, 21, 22, 23, 24, 25, 26, 27, 28, 29, 30, 31, 32, 33, 34, 35, 36, 37, 38, 39, 40, 41, 42, 43, 44, 45, 46, 47, 48, 49, 50, 51, 52, 53, 54, 55, 56, 57, 58, 59, 60, 61, 62, 63, 64, 65, 66, 67, 68, 69, 70, 71, 72, 73, 74, 75, 76, 77, 78, 79, 80, 81, 82, 83, 84, 85, 86, 87, 88, 89, 90, 91, 92, 93, 94, 95, 96, 97, 98, 99, to/or 100 nucleotides at each target sequence of said cell(s). The modification can include the introduction, deletion, or substitution of 20, 21, 22, 23, 24, 25, 26, 27, 28, 29, 30, 31, 32, 33, 34, 35, 36, 37, 38, 39, 40, 41, 42, 43, 44, 45, 46, 47, 48, 49, 50, 51, 52, 53, 54, 55, 56, 57, 58, 59, 60, 61, 62, 63, 64, 65, 66, 67, 68, 69, 70, 71, 72, 73, 74, 75, 76, 77, 78, 79, 80, 81, 82, 83, 84, 85, 86, 87, 88, 89, 90, 91, 92, 93, 94, 95, 96, 97, 98, 99, to/or 100 nucleotides at each target sequence of said cell(s). The modification can include the introduction, deletion, or substitution of 40, 45, 50, 75, 100, 200, 300, 400 to/or 500 nucleotides at each target sequence of said cell(s). The modification can include the introduction, deletion, or substitution of about 100, 200, 300, 400, 500, 600, 700, 800, 900, 1000, 1100, 1200, 1300, 1400, 1500, 1600, 1700, 1800, 1900, 2000, 2100, 2200, 2300, 2400, 2500, 2600, 2700, 2800, 2900, 3000, 3100, 3200, 3300, 3400, 3500, 3600, 3700, 3800, 3900, 4000, 4100, 4200, 4300, 4400, 4500, 4600, 4700, 4800, 4900, 5000, 5100, 5200, 5300, 5400, 5500, 5600, 5700, 5800, 5900, 6000, 6100, 6200, 6300, 6400, 6500, 6600, 6700, 6800, 6900, 7000, 7100, 7200, 7300, 7400, 7500, 7600, 7700, 7800, 7900, 8000, 8100, 8200, 8300, 8400, 8500, 8600, 8700, 8800, 8900, 9000, 9100, 9200, 9300, 9400, 9500, 9600, 9700, 9800, 9900 to/or about 10000 nucleotides at each target sequence of said cell(s).

[0885] In some embodiments, the modifications can include the introduction, deletion, or substitution of nucleotides at each target sequence of said cell(s) via nucleic acid components (e.g., guide(s) RNA(s) or sgRNA(s)), such as those mediated by a CRISPR-Cas system or a component thereof described elsewhere herein. In some embodiments, the modifications can include the introduction, deletion, or substitution of nucleotides at a target or random sequence of said cell(s) via a non CRISPR-Cas system or technique.

[0886] The target genes and/or sequences of polynucleotides to be modified to treat or prevent disease are described in greater detail below.

[0887] As is also discussed elsewhere herein, the CRISPR-Cas system can include a template or donor polynucleotide (also referred to herein as template nucleic acids, template sequence, donor sequence, donor nucleic acid(s) and the like). In an embodiment, the template or donor nucleic acid alters the structure of the target position by participating in homologous recombination. In an embodiment, the template or donor nucleic acid alters the sequence of the target position. In an embodiment, the template or donor nucleic acid results in the incorporation of a modified, or non-naturally occurring base or bases into the target nucleic acid. In an embodiment, the template or donor nucleic acid results in the incorporation of a modified, or non-naturally occurring (relative to the original target polynucleotide) gene or fragment thereof into the target nucleic acid.

[0888] The template or donor sequence may undergo a breakage mediated or catalyzed recombination with the target sequence. In an embodiment, the template nucleic acid can include sequence that corresponds to a site on the target sequence that is cleaved, nicked, or otherwise modified by one or more Cas effector mediated cleavage event(s). In an embodiment, the template nucleic acid can include sequence that corresponds to both, a first site on the target sequence that is cleaved, nicked, or otherwise modified in a first Cas effector mediated event, and a second site on the target sequence that is cleaved in a second Cas effector mediated event.

[0889] In certain embodiments, the template or donor nucleic acid can include a sequence which results in an alteration in the coding sequence of a translated sequence, e.g., one which results in the substitution of one amino acid for another in a protein product, e.g., transforming a mutant allele into a wild type allele, transforming a wild type allele into a mutant allele, and/or introducing a stop codon, insertion of an amino acid residue, deletion of an amino acid residue, or a nonsense mutation. In certain embodiments, the template or donor nucleic acid can include a sequence which results in an alteration in a non-coding sequence, e.g., an alteration in an exon or in a 5′ or 3′ non-translated or non-transcribed region. Such alterations include an alteration in a control element, e.g., a promoter, enhancer, and an alteration in a cis-acting or trans-acting control element.

[0890] A template or donor nucleic acid having homology with a target position in a target gene may be used to alter the structure of a target sequence. The template or donor sequence may be used to alter an unwanted structure, e.g., an unwanted or mutant nucleotide. The template or donor nucleic acid may include sequence which, when integrated, results in: decreasing the activity of a positive control element; increasing the activity of a positive control element; decreasing the activity of a negative control element; increasing the activity of a negative control element; decreasing the expression of a gene; increasing the expression of a gene; increasing resistance to a disorder or disease; increasing resistance to viral entry; correcting a mutation or altering an unwanted amino acid residue conferring, increasing, abolishing or decreasing a biological property of a gene product, e.g., increasing the enzymatic activity of an enzyme, or increasing the ability of a gene product to interact with another molecule.

[0891] The template or donor nucleic acid may include sequence which results in: a change in sequence of 1, 2, 3, 4, 5, 6, 7, 8, 9, 10, 11, 12 or more nucleotides of the target sequence. In an embodiment, the template or donor nucleic acid may be 20+/−10, 30+/−10, 40+/−10, 50+/−10, 60+/−10, 70+/−10, 80+/−10, 90+/−10, 100+/−10, 110+/−10, 120+/−10, 130+/−10, 140+/−10, 150+/−10, 160+/−10, 170+/−10, 180+/−10, 190+/−10, 200+/−10, 210+/−10, of 220+/−10 nucleotides in length. In an embodiment, the template or donor nucleic acid may be 30+/−20, 40+/−20, 50+/−20, 60+/−20, 70+/−20, 80+/−20, 90+/−20, 100+/−20, 110+/−20, 120+/−20, 130+/−20, 140+/−20, 150+/−20, 160+/−20, 170+/−20, 180+/−20, 190+/−20, 200+/−20, 210+/−20, of 220+/−20 nucleotides in length. In an embodiment, the template or donor nucleic acid is 10 to 1,000, 20 to 900, 30 to 800, 40 to 700, 50 to 600, 50 to 500, 50 to 400, 50 to 300, 50 to 200, or 50 to 100 nucleotides in length.

[0892] In some embodiments, a template or donor nucleic acid comprises the following components: [5′ homology arm]-[replacement sequence]-[3′ homology arm]. The homology arms provide for recombination into the chromosome, thus replacing the undesired element, e.g., a mutation or signature, with the replacement sequence. In an embodiment, the homology arms flank the most distal cleavage sites. In an embodiment, the 3′ end of the 5′ homology arm is the position next to the 5′ end of the replacement sequence. In an embodiment, the 5′ homology arm can extend at least 10, 20, 30, 40, 50, 100, 200, 300, 400, 500, 600, 700, 800, 900, 1000, 1500, or 2000 nucleotides 5′ from the 5′ end of the replacement sequence. In an embodiment, the 5′ end of the 3′ homology arm is the position next to the 3′ end of the replacement sequence. In an embodiment, the 3′ homology arm can extend at least 10, 20, 30, 40, 50, 100, 200, 300, 400, 500, 600, 700, 800, 900, 1000, 1500, or 2000 nucleotides 3′ from the 3′ end of the replacement sequence.

[0893] In certain embodiments, one or both homology arms may be shortened to avoid including certain sequence repeat elements. For example, a 5′ homology arm may be shortened to avoid a sequence repeat element. In other embodiments, a 3′ homology arm may be shortened to avoid a sequence repeat element. In some embodiments, both the 5′ and the 3′ homology arms may be shortened to avoid including certain sequence repeat elements.

[0894] In certain embodiments, a template or donor nucleic acid for correcting a mutation may designed for use as a single-stranded oligonucleotide. When using a single-stranded oligonucleotide, 5′ and 3′ homology arms may range up to about 200 base pairs (bp) in length, e.g., at least 25, 50, 75, 100, 125, 150, 175, or 200 bp in length.

[0895] In some embodiments, the CRISPR-Cas system or component thereof can promote a specific double stranded break (DSB) repair pathway such as Non-Homologous End-Joining (NHEJ) or homology directed repair (HDR). Various approaches such as template or donor configuration, target sequence selection, guide sequence configuration, and/or the incorporation of one or more DSB repair pathway modulators in the CRISPR-Cas system can be used to promote and/or minimize a specific DSB repair pathway. Such mechanisms and approaches are described in greater detail below and elsewhere herein.

[0896] In some embodiments, the CRISRP-Cas system promotes Non-Homologous End-Joining (NHEJ). In some embodiments, modification of a polynucleotide by a CRISPR-Cas system or a component thereof, such as a diseased polynucleotide, can include NHEJ and/or HDR. In some embodiments, promotion of this NHEJ or HDR pathway by the CRISPR-Cas system or a component thereof can be used to target gene or polynucleotide specific knock-outs and/or knock-ins. In some embodiments, promotion of the NHEJ repair pathway by the CRISPR-Cas system or a component thereof can be used to generate NHEJ-mediated indels. Nuclease-induced NHEJ can also be used to remove (e.g., delete) sequence in a gene of interest. Generally, NHEJ repairs a double-strand break in the DNA by joining together the two ends; however, generally, the original sequence is restored only if two compatible ends, exactly as they were formed by the double-strand break, are perfectly ligated. The DNA ends of the double-strand break are frequently the subject of enzymatic processing, resulting in the addition or removal of nucleotides, at one or both strands, prior to rejoining of the ends. This results in the presence of insertion and/or deletion (indel) mutations in the DNA sequence at the site of the NHEJ repair. The indel can range in size from 1-50 or more base pairs. In some embodiments the indel can be 1, 2, 3, 4, 5, 6, 7, 8, 9, 10, 11, 12, 13, 14, 15, 16, 17, 18, 19, 20, 21, 22, 23, 24, 25, 26, 27, 28, 29, 30, 31, 32, 33, 34, 35, 36, 37, 38, 39, 40, 41, 42, 43, 44, 45, 46, 47, 48, 49, 50, 51, 52, 53, 54, 55, 56, 57, 58, 59, 60, 61, 62, 63, 64, 65, 66, 67, 68, 69, 70, 71, 72, 73, 74, 75, 76, 77, 78, 79, 80, 81, 82, 83, 84, 85, 86, 87, 88, 89, 90, 91, 92, 93, 94, 95, 96, 97, 98, 99, 100, 101, 102, 103, 104, 105, 106, 107, 108, 109, 110, 111, 112, 113, 114, 115, 116, 117, 118, 119, 120, 121, 122, 123, 124, 125, 126, 127, 128, 129, 130, 131, 132, 133, 134, 135, 136, 137, 138, 139, 140, 141, 142, 143, 144, 145, 146, 147, 148, 149, 150, 151, 152, 153, 154, 155, 156, 157, 158, 159, 160, 161, 162, 163, 164, 165, 166, 167, 168, 169, 170, 171, 172, 173, 174, 175, 176, 177, 178, 179, 180, 181, 182, 183, 184, 185, 186, 187, 188, 189, 190, 191, 192, 193, 194, 195, 196, 197, 198, 199, 200, 201, 202, 203, 204, 205, 206, 207, 208, 209, 210, 211, 212, 213, 214, 215, 216, 217, 218, 219, 220, 221, 222, 223, 224, 225, 226, 227, 228, 229, 230, 231, 232, 233, 234, 235, 236, 237, 238, 239, 240, 241, 242, 243, 244, 245, 246, 247, 248, 249, 250, 251, 252, 253, 254, 255, 256, 257, 258, 259, 260, 261, 262, 263, 264, 265, 266, 267, 268, 269, 270, 271, 272, 273, 274, 275, 276, 277, 278, 279, 280, 281, 282, 283, 284, 285, 286, 287, 288, 289, 290, 291, 292, 293, 294, 295, 296, 297, 298, 299, 300, 301, 302, 303, 304, 305, 306, 307, 308, 309, 310, 311, 312, 313, 314, 315, 316, 317, 318, 319, 320, 321, 322, 323, 324, 325, 326, 327, 328, 329, 330, 331, 332, 333, 334, 335, 336, 337, 338, 339, 340, 341, 342, 343, 344, 345, 346, 347, 348, 349, 350, 351, 352, 353, 354, 355, 356, 357, 358, 359, 360, 361, 362, 363, 364, 365, 366, 367, 368, 369, 370, 371, 372, 373, 374, 375, 376, 377, 378, 379, 380, 381, 382, 383, 384, 385, 386, 387, 388, 389, 390, 391, 392, 393, 394, 395, 396, 397, 398, 399, 400, 401, 402, 403, 404, 405, 406, 407, 408, 409, 410, 411, 412, 413, 414, 415, 416, 417, 418, 419, 420, 421, 422, 423, 424, 425, 426, 427, 428, 429, 430, 431, 432, 433, 434, 435, 436, 437, 438, 439, 440, 441, 442, 443, 444, 445, 446, 447, 448, 449, 450, 451, 452, 453, 454, 455, 456, 457, 458, 459, 460, 461, 462, 463, 464, 465, 466, 467, 468, 469, 470, 471, 472, 473, 474, 475, 476, 477, 478, 479, 480, 481, 482, 483, 484, 485, 486, 487, 488, 489, 490, 491, 492, 493, 494, 495, 496, 497, 498, 499, or 500 base pairs or more. If a double-strand break is targeted near to a short target sequence, the deletion mutations caused by the NHEJ repair often span, and therefore remove, the unwanted nucleotides. For the deletion of larger DNA segments, introducing two double-strand breaks, one on each side of the sequence, can result in NHEJ between the ends with removal of the entire intervening sequence. Both of these approaches can be used to delete specific DNA sequences.

[0897] In some embodiments, CRISPR-Cas system mediated NHEJ can be used in the method to delete small sequence motifs. In some embodiments, CRISPR-Cas system mediated NHEJ can be used in the method to generate NHEJ-mediate indels that can be targeted to the gene, e.g., a coding region, e.g., an early coding region of a gene of interest can be used to knockout (i.e., eliminate expression of) a gene of interest. For example, early coding region of a gene of interest includes sequence immediately following a transcription start site, within a first exon of the coding sequence, or within 500 bp of the transcription start site (e.g., less than 500, 450, 400, 350, 300, 250, 200, 150, 100 or 50 bp). In an embodiment, in which a guide RNA and Cas effector generate a double strand break for the purpose of inducing NHEJ-mediated indels, a guide RNA may be configured to position one double-strand break in close proximity to a nucleotide of the target position. In an embodiment, the cleavage site may be between 0-500 bp away from the target position (e.g., less than 500, 400, 300, 200, 100, 50, 40, 30, 25, 20, 15, 10, 9, 8, 7, 6, 5, 4, 3, 2 or 1 bp from the target position). In an embodiment, in which two guide RNAs complexing with one or more Cas nickases induce two single strand breaks for the purpose of inducing NHEJ-mediated indels, two guide RNAs may be configured to position two single-strand breaks to provide for NHEJ repair a nucleotide of the target position.

[0898] In some embodiments, the NHEJ repair pathway is minimized or reduced and/or the HDR pathway is promoted. In some embodiments, the CRISPR-Cas system includes one or more NHEJ inhibitors and/or one or more HDR activators. In some embodiments, the donor polynucleotide is configured to promote HDR, the target sequence is selected to promote HDR, the guide molecule is configured to promote HDR, or a combination thereof. In some embodiments, the CRISPR-Cas system includes one or more NHEJ inhibitors and/or one or more HDR activators.

[0899] For minimization of toxicity and off-target effect, the concentration of Cas mRNA and guide RNA delivered can be optimized and controlled. Optimal concentrations of Cas mRNA and guide RNA can be determined by testing different concentrations in a cellular or non-human eukaryote animal model and using deep sequencing the analyze the extent of modification at potential off-target genomic loci. Alternatively, to minimize the level of toxicity and off-target effect, Cas nickase mRNA (for example small Type II-D Cas with the D10A mutation) can be delivered with a pair of guide RNAs targeting a site of interest. Guide sequences and strategies to minimize toxicity and off-target effects can be as in International Patent Publication No. WO 2014/093622 (PCT/US2013/074667); or, via mutation. Others are as described elsewhere herein.

[0900] Typically, in the context of an endogenous CRISPR system, formation of a CRISPR complex (comprising a guide sequence hybridized to a target sequence and complexed with one or more Cas proteins) results in cleavage, nicking, and/or another modification of one or both strands in or near (e.g., within 1, 2, 3, 4, 5, 6, 7, 8, 9, 10, 20, 50, or more base pairs from) the target sequence. In some embodiments, the tracr sequence, which may comprise or consist of all or a portion of a wild-type tracr sequence (e.g., about or more than about 20, 26, 32, 45, 48, 54, 63, 67, 85, or more nucleotides of a wild-type tracr sequence), can also form part of a CRISPR complex, such as by hybridization along at least a portion of the tracr sequence to all or a portion of a tracr mate sequence that is operably linked to the guide sequence.

[0901] In some embodiments, a method of modifying a target polynucleotide in a cell to treat or prevent a disease can include allowing a CRISPR-Cas system or component thereof to bind to the target polynucleotide, e.g., to effect cleavage, nicking, or other modification as the CRISPR-Cas system is capable of said target polynucleotide, thereby modifying the target polynucleotide, wherein the CRISPR-Cas system or component thereof, complex with a guide sequence, and hybridize said guide sequence to a target sequence within the target polynucleotide, wherein said guide sequence is optionally linked to a tracr mate sequence, which in turn can hybridize to a tracr sequence. In some of these embodiments, the CRISPR-Cas system or component thereof can be or include a CRISPR-Cas effector complexed with a guide sequence. In some embodiments, modification can include cleaving or nicking one or two strands at the location of the target sequence by one or more components of the CRISPR-Cas system or component thereof.

[0902] The cleavage, nicking, or other modification capable of being performed by the CRISPR-Cas system can modify transcription of a target polynucleotide. In some embodiments, modification of transcription can include decreasing transcription of a target polynucleotide. In some embodiments, modification can include increasing transcription of a target polynucleotide. In some embodiments, the method includes repairing said cleaved target polynucleotide by homologous recombination with an exogenous template polynucleotide, wherein said repair results in a modification such as, but not limited to, an insertion, deletion, or substitution of one or more nucleotides of said target polynucleotide. In some embodiments, said modification results in one or more amino acid changes in a protein expressed from a gene comprising the target sequence. In some embodiments, the modification imparted by the CRISPR-Cas system or component thereof provides a transcript and/or protein that can correct a disease or a symptom thereof, including but not limited to, any of those described in greater detail elsewhere herein.

[0903] In some embodiments, the method of treating or preventing a disease can include delivering one or more vectors or vector systems to a cell, such as a eukaryotic or prokaryotic cell, wherein one or more vectors or vector systems include the CRISPR-Cas system or component thereof. In some embodiments, the vector(s) or vector system(s) can be a viral vector or vector system, such as an AAV or lentiviral vector system, which are described in greater detail elsewhere herein. In some embodiments, the method of treating or preventing a disease can include delivering one or more viral particles, such as an AAV or lentiviral particle, containing the CRISPR-Cas system or component thereof. In some embodiments, the viral particle has a tissue specific tropism. In some embodiments, the viral particle has a liver, muscle, eye, heart, pancreas, kidney, neuron, epithelial cell, endothelial cell, astrocyte, glial cell, immune cell, or red blood cell specific tropism.

[0904] It will be understood that the CRISPR-Cas systems according to the invention as described herein, such as the CRISPR-Cas systems for use in the methods according to the invention as described herein, may be suitably used for any type of application known for CRISPR-Cas systems, preferably in eukaryotes. In certain embodiments, the application is therapeutic, preferably therapeutic in a eukaryote organism, such as including but not limited to animals (including human), plants, algae, fungi (including yeasts), etc. Alternatively, or in addition, in certain embodiments, the application may involve accomplishing or inducing one or more particular traits or characteristics, such as genotypic and/or phenotypic traits or characteristics, as also described elsewhere herein.

### Treating Diseases of the Circulatory System

[0905] In some embodiments, the CRISPR-Cas system and/or component thereof described herein can be used to treat and/or prevent a circulatory system disease. Exemplary diseases are provided, for example, in Tables 11 and 12, as well as a disease identified as being caused or attributed to a mtDNA mutation set forth at mitomap.org. In some embodiments the plasma exosomes of Wahlgren et al. (Nucleic Acids Research, 2012, Vol. 40, No. 17 e130) can be used to deliver the CRISPR-Cas system and/or component thereof described herein to the blood. In some embodiments, the circulatory system disease can be treated by using a lentivirus to deliver the CRISPR-Cas system described herein to modify hematopoietic stem cells (HSCs) in vivo or ex vivo (see e.g. Drakopoulou, “Review Article, The Ongoing Challenge of Hematopoietic Stem Cell-Based Gene Therapy for β-Thalassemia,” Stem Cells International, Volume 2011, Article ID 987980, 10 pages, doi:10.4061/2011/987980, which can be adapted for use with the CRISPR-Cas systems herein in view of the description herein). In some embodiments, the circulatory system disorder can be treated by correcting HSCs as to the disease using a CRISPR-Cas system herein or a component thereof, wherein the CRISPR-Cas system optionally includes a suitable HDR repair template (see e.g. Cavazzana, “Outcomes of Gene Therapy for β-Thalassemia Major via Transplantation of Autologous Hematopoietic Stem Cells Transduced Ex vivo with a Lentiviral βA-T87Q-Globin Vector.”; Cavazzana-Calvo, “Transfusion independence and HMGA2 activation after gene therapy of human 0-thalassaemia”, Nature 467, 318-322 (16 Sep. 2010) doi:10.1038/nature09328; Nienhuis, “Development of Gene Therapy for Thalassemia, Cold Spring Harbor Perspectives in Medicine, doi: 10.1101/cshperspect.a011833 (2012), LentiGlobin BB305, a lentiviral vector containing an engineered β-globin gene (βA-T87Q); and Xie et al., “Seamless gene correction of β-thalassaemia mutations in patient-specific iPSCs using CRISPR/Cas9 and piggyback” Genome Research gr.173427.114 (2014) http://www.genome.org/cgi/doi/10.1101/gr.173427.114 (Cold Spring Harbor Laboratory Press; [1599] Watts, “Hematopoietic Stem Cell Expansion and Gene Therapy” Cytotherapy 13(10):1164-1171. doi:10.3109/14653249.2011.620748 (2011), which can be adapted for use with the CRISPR-Cas systems herein in view of the description herein). In some embodiments, iPSCs can be modified using a CRISPR-Cas system described herein to correct a disease polynucleotide associated with a circulatory disease. In this regard, the teachings of Xu et al. (Sci Rep. 2015 Jul. 9; 5:12065. doi: 10.1038/srep12065) and Song et al. (Stem Cells Dev. 2015 May 1; 24(9):1053-65. doi: 10.1089/scd.2014.0347. Epub 2015 Feb. 5) with respect to modifying iPSCs can be adapted for use in view of the description herein with the CRISPR-Cas systems described herein.

[0906] The term “Hematopoietic Stem Cell” or “HSC” refers broadly those cells considered to be an HSC, e.g., blood cells that give rise to all the other blood cells and are derived from mesoderm; located in the red bone marrow, which is contained in the core of most bones. HSCs of the invention include cells having a phenotype of hematopoietic stem cells, identified by small size, lack of lineage (lin) markers, and markers that belong to the cluster of differentiation series, like: CD34, CD38, CD90, CD133, CD105, CD45, and also c-kit, —the receptor for stem cell factor. Hematopoietic stem cells are negative for the markers that are used for detection of lineage commitment, and are, thus, called Lin−; and, during their purification by FACS, a number of up to 14 different mature blood-lineage markers, e.g., CD13 & CD33 for myeloid, CD71 for erythroid, CD19 for B cells, CD61 for megakaryocytic, etc. for humans; and, B220 (murine CD45) for B cells, Mac-1 (CD11b/CD18) for monocytes, Gr-1 for Granulocytes, Ter119 for erythroid cells, Il7Ra, CD3, CD4, CD5, CD8 for T cells, etc. Mouse HSC markers: CD34lo/−, SCA-1+, Thy1.1+/lo, CD38+, C-kit+, lin−, and Human HSC markers: CD34+, CD59+, Thy1/CD90+, CD38lo/−, C-kit/CD117+, and lin−. HSCs are identified by markers. Hence in embodiments discussed herein, the HSCs can be CD34+ cells. HSCs can also be hematopoietic stem cells that are CD34−/CD38−. Stem cells that may lack c-kit on the cell surface that are considered in the art as HSCs are within the ambit of the invention, as well as CD133+ cells likewise considered HSCs in the art.

[0907] In some embodiments, the treatment or prevention for treating a circulatory system or blood disease can include modifying a human cord blood cell with any modification described herein. In some embodiments, the treatment or prevention for treating a circulatory system or blood disease can include modifying a granulocyte colony-stimulating factor-mobilized peripheral blood cell (mPB) with any modification described herein. In some embodiments, the human cord blood cell or mPB can be CD34+. In some embodiments, the cord blood cell(s) or mPB cell(s) modified can be autologous. In some embodiments, the cord blood cell(s) or mPB cell(s) can be allogenic. In addition to the modification of the disease gene(s), allogenic cells can be further modified using the composition, system, described herein to reduce the immunogenicity of the cells when delivered to the recipient. Such techniques are described elsewhere herein and e.g. Cartier, “MINI-SYMPOSIUM: X-Linked Adrenoleukodystrophypa, Hematopoietic Stem Cell Transplantation and Hematopoietic Stem Cell Gene Therapy in X-Linked Adrenoleukodystrophy,” Brain Pathology 20 (2010) 857-862, which can be adapted for use with the composition, system, herein. The modified cord blood cell(s) or mPB cell(s) can be optionally expanded in vitro. The modified cord blood cell(s) or mPB cell(s) can be derived to a subject in need thereof using any suitable delivery technique.

[0908] The CRISPR-Cas (system may be engineered to target genetic locus or loci in HSCs. In some embodiments, the Cas effector(s) can be codon-optimized for a eukaryotic cell and especially a mammalian cell, e.g., a human cell, for instance, HSC, or iPSC and sgRNA targeting a locus or loci in HSC, such as circulatory disease, can be prepared. These may be delivered via particles. The particles may be formed by the Cas effector (e.g., small Type II-D Cas) protein and the gRNA being admixed. The gRNA and Cas effector (e.g., small Type II-D Cas) protein mixture can be, for example, admixed with a mixture comprising or consisting essentially of or consisting of surfactant, phospholipid, biodegradable polymer, lipoprotein and alcohol, whereby particles containing the gRNA and Cas effector (e.g., small Type II-D Cas) protein may be formed. The invention comprehends so making particles and particles from such a method as well as uses thereof. Particles suitable delivery of the CRISRP-Cas systems in the context of blood or circulatory system or HSC delivery to the blood or circulatory system are described in greater detail elsewhere herein.

[0909] In some embodiments, after ex vivo modification the HSCs or iPCS can be expanded prior to administration to the subject. Expansion of HSCs can be via any suitable method such as that described by, Lee, “Improved ex vivo expansion of adult hematopoietic stem cells by overcoming CUL4-mediated degradation of HOXB4.” Blood. 2013 May 16; 121(20):4082-9. doi: 10.1182/blood-2012-09-455204. Epub 2013 Mar. 21.

[0910] In some embodiments, the HSCs or iPSCs modified can be autologous. In some embodiments, the HSCs or iPSCs can be allogenic. In addition to the modification of the disease gene(s), allogenic cells can be further modified using the CRISPR-Cas system described herein to reduce the immunogenicity of the cells when delivered to the recipient. Such techniques are described elsewhere herein and e.g. Cartier, “MINI-SYMPOSIUM: X-Linked Adrenoleukodystrophypa, Hematopoietic Stem Cell Transplantation and Hematopoietic Stem Cell Gene Therapy in X-Linked Adrenoleukodystrophy,” Brain Pathology 20 (2010) 857-862, which can be adapted for use with the CRISPR-Cas system herein.

### Treating Diseases of the Brain

[0911] In some embodiments, the CRISPR-Cas systems described herein can be used to treat diseases of the brain and CNS. Delivery options for the brain include encapsulation of CRISPR enzyme and guide RNA in the form of either DNA or RNA into liposomes and conjugating to molecular Trojan horses for trans-blood brain barrier (BBB) delivery. Molecular Trojan horses have been shown to be effective for delivery of B-gal expression vectors into the brain of non-human primates. The same approach can be used to delivery vectors containing CRISPR enzyme and guide RNA. For instance, Xia C F and Boado R J, Pardridge W M (“Antibody-mediated targeting of siRNA via the human insulin receptor using avidin-biotin technology.” Mol Pharm. 2009 May-June; 6(3):747-51. doi: 10.1021/mp800194) describes how delivery of short interfering RNA (siRNA) to cells in culture, and in vivo, is possible with combined use of a receptor-specific monoclonal antibody (mAb) and avidin-biotin technology. The authors also report that because the bond between the targeting mAb and the siRNA is stable with avidin-biotin technology, and RNAi effects at distant sites such as brain are observed in vivo following an intravenous administration of the targeted siRNA, the teachings of which can be adapted for use with the CRISPR-Cas systems herein. In other embodiments, an artificial virus can be generated for CNS and/or brain delivery. See e.g. Zhang et al. (Mol Ther. 2003 January; 7(1):11-8)), the teachings of which can be adapted for use with the CRISPR-Cas systems herein.

### Treating Hearing Diseases

[0912] In some embodiments the CRISPR-Cas system described herein can be used to treat a hearing disease or hearing loss in one or both ears. Deafness is often caused by lost or damaged hair cells that cannot relay signals to auditory neurons. In such cases, cochlear implants may be used to respond to sound and transmit electrical signals to the nerve cells. But these neurons often degenerate and retract from the cochlea as fewer growth factors are released by impaired hair cells.

[0913] In some embodiments, the CRISPR-Cas system or modified cells can be delivered to one or both ears for treating or preventing hearing disease or loss by any suitable method or technique. Suitable methods and techniques include, but are not limited to, those set forth in US Patent Publication No. 20120328580 describes injection of a pharmaceutical composition into the ear (e.g., auricular administration), such as into the luminae of the cochlea (e.g., the Scala media, Sc vestibulae, and Sc tympani), e.g., using a syringe, e.g., a single-dose syringe. For example, one or more of the compounds described herein can be administered by intratympanic injection (e.g., into the middle ear), and/or injections into the outer, middle, and/or inner ear; administration in situ, via a catheter or pump (see e.g. McKenna et al., (U.S. Publication No. 2006/0030837) and Jacobsen et al., (U.S. Pat. No. 7,206,639); administration in combination with a mechanical device such as a cochlear implant or a hearing aid, which is worn in the outer ear (see e.g. U.S. Publication No. 2007/0093878, which provides an exemplary cochlear implant suitable for delivery of the CRISPR-Cas systems described herein to the ear). Such methods are routinely used in the art, for example, for the administration of steroids and antibiotics into human ears. Injection can be, for example, through the round window of the ear or through the cochlear capsule. Other inner ear administration methods are known in the art (see, e.g., Salt and Plontke, Drug Discovery Today, 10:1299-1306, 2005). In some embodiments, a catheter or pump can be positioned, e.g., in the ear (e.g., the outer, middle, and/or inner ear) of a patient during a surgical procedure. In some embodiments, a catheter or pump can be positioned, e.g., in the ear (e.g., the outer, middle, and/or inner ear) of a patient without the need for a surgical procedure.

[0914] In general, the cell therapy methods described in US Patent Publication No. 20120328580 can be used to promote complete or partial differentiation of a cell to or towards a mature cell type of the inner ear (e.g., a hair cell) in vitro. Cells resulting from such methods can then be transplanted or implanted into a patient in need of such treatment. The cell culture methods required to practice these methods, including methods for identifying and selecting suitable cell types, methods for promoting complete or partial differentiation of selected cells, methods for identifying complete or partially differentiated cell types, and methods for implanting complete or partially differentiated cells are described below.

[0915] Cells suitable for use in the present invention include, but are not limited to, cells that are capable of differentiating completely or partially into a mature cell of the inner ear, e.g., a hair cell (e.g., an inner and/or outer hair cell), when contacted, e.g., in vitro, with one or more of the compounds described herein. Exemplary cells that are capable of differentiating into a hair cell include, but are not limited to stem cells (e.g., inner ear stem cells, adult stem cells, bone marrow derived stem cells, embryonic stem cells, mesenchymal stem cells, skin stem cells, iPS cells, and fat derived stem cells), progenitor cells (e.g., inner ear progenitor cells), support cells (e.g., Deiters' cells, pillar cells, inner phalangeal cells, tectal cells and Hensen's cells), and/or germ cells. The use of stem cells for the replacement of inner ear sensory cells is described in Li et al., (U.S. Publication No. 2005/0287127) and Li et al., (U.S. patent application Ser. No. 11/953,797). The use of bone marrow derived stem cells for the replacement of inner ear sensory cells is described in Edge et al., PCT/US2007/084654. iPS cells are described, e.g., at Takahashi et al., Cell, Volume 131, Issue 5, Pages 861-872 (2007); Takahashi and Yamanaka, Cell 126, 663-76 (2006); Okita et al., Nature 448, 260-262 (2007); Yu, J. et al., Science 318(5858):1917-1920 (2007); Nakagawa et al., Nat. Biotechnol. 26:101-106 (2008); and Zaehres and Scholer, Cell 131(5):834-835 (2007). Such suitable cells can be identified by analyzing (e.g., qualitatively or quantitatively) the presence of one or more tissue specific genes. For example, gene expression can be detected by detecting the protein product of one or more tissue-specific genes. Protein detection techniques involve staining proteins (e.g., using cell extracts or whole cells) using antibodies against the appropriate antigen. In this case, the appropriate antigen is the protein product of the tissue-specific gene expression. Although, in principle, a first antibody (i.e., the antibody that binds the antigen) can be labeled, it is more common (and improves the visualization) to use a second antibody directed against the first (e.g., an anti-IgG). This second antibody is conjugated either with fluorochromes, or appropriate enzymes for colorimetric reactions, or gold beads (for electron microscopy), or with the biotin-avidin system, so that the location of the primary antibody, and thus the antigen, can be recognized.

[0916] The CRISPR Cas molecules of the present invention may be delivered to the ear by direct application of pharmaceutical composition to the outer ear, with compositions modified from US Published application, 20110142917. In some embodiments the pharmaceutical composition is applied to the ear canal. Delivery to the ear may also be referred to as aural or otic delivery.

[0917] In some embodiments, the CRISPR-Cas systems or components thereof and/or vectors or vector systems can be delivered to ear via a transfection to the inner ear through the intact round window by a novel proteidic delivery technology which may be applied to the nucleic acid-targeting system of the present invention (see, e.g., Qi et al., Gene Therapy (2013), 1-9). About 40 μl of 10 mM RNA may be contemplated as the dosage for administration to the ear.

[0918] According to Rejali et al. (Hear Res. 2007 June; 228(1-2):180-7), cochlear implant function can be improved by good preservation of the spiral ganglion neurons, which are the target of electrical stimulation by the implant and brain derived neurotrophic factor (BDNF) has previously been shown to enhance spiral ganglion survival in experimentally deafened ears. Rejali et al. tested a modified design of the cochlear implant electrode that includes a coating of fibroblast cells transduced by a viral vector with a BDNF gene insert. To accomplish this type of ex vivo gene transfer, Rejali et al. transduced guinea pig fibroblasts with an adenovirus with a BDNF gene cassette insert, and determined that these cells secreted BDNF and then attached BDNF-secreting cells to the cochlear implant electrode via an agarose gel, and implanted the electrode in the scala tympani. Rejali et al. determined that the BDNF expressing electrodes were able to preserve significantly more spiral ganglion neurons in the basal turns of the cochlea after 48 days of implantation when compared to control electrodes and demonstrated the feasibility of combining cochlear implant therapy with ex vivo gene transfer for enhancing spiral ganglion neuron survival. Such a system may be applied to the nucleic acid-targeting system of the present invention for delivery to the ear.

[0919] In some embodiments, the system set forth in Mukherjea et al. (Antioxidants & Redox Signaling, Volume 13, Number 5, 2010) can be adapted for transtympanic administration of the CRISPR-Cas system or component thereof to the ear. In some embodiments, a dosage of about 2 mg to about 4 mg of CRISPR Cas for administration to a human.

[0920] In some embodiments, the system set forth in [Jung et al. (Molecular Therapy, vol. 21 no. 4, 834-841 April 2013) can be adapted for vestibular epithelial delivery of the CRISPR-Cas system or component thereof to the ear. In some embodiments, a dosage of about 1 to about 30 mg of CRISPR Cas for administration to a human.

### Treating Diseases in Non-Dividing Cells

[0921] In some embodiments, the gene or transcript to be corrected is in a non-dividing cell. Exemplary non-dividing cells are muscle cells or neurons. Non-dividing (especially non-dividing, fully differentiated) cell types present issues for gene targeting or genome engineering, for example because homologous recombination (HR) is generally suppressed in the G1 cell-cycle phase. However, while studying the mechanisms by which cells control normal DNA repair systems, Durocher discovered a previously unknown switch that keeps HR “off” in non-dividing cells and devised a strategy to toggle this switch back on. Orthwein et al. (Daniel Durocher's lab at the Mount Sinai Hospital in Ottawa, Canada) recently reported (Nature 16142, published online 9 Dec. 2015) have shown that the suppression of HR can be lifted and gene targeting successfully concluded in both kidney (293T) and osteosarcoma (U2OS) cells. Tumor suppressors, BRCA1, PALB2 and BRAC2 are known to promote DNA DSB repair by HR. They found that formation of a complex of BRCA1 with PALB2-BRAC2 is governed by a ubiquitin site on PALB2, such that action on the site by an E3 ubiquitin ligase. This E3 ubiquitin ligase is composed of KEAP1 (a PALB2-interacting protein) in complex with cullin-3 (CUL3)-RBX1. PALB2 ubiquitylation suppresses its interaction with BRCA1 and is counteracted by the deubiquitylase USP11, which is itself under cell cycle control. Restoration of the BRCA1-PALB2 interaction combined with the activation of DNA-end resection is sufficient to induce homologous recombination in G1, as measured by a number of methods including a CRISPR-Cas9-based gene-targeting assay directed at USP11 or KEAP1 (expressed from a pX459 vector). However, when the BRCA1-PALB2 interaction was restored in resection-competent G1 cells using either KEAP1 depletion or expression of the PALB2-KR mutant, a robust increase in gene-targeting events was detected. These teachings can be adapted for and/or applied to the small Type II-D CRISPR-Cas systems described herein.

[0922] Thus, reactivation of HR in cells, especially non-dividing, fully differentiated cell types is preferred, in some embodiments. In some embodiments, promotion of the BRCA1-PALB2 interaction is preferred in some embodiments. In some embodiments, the target ell is a non-dividing cell. In some embodiments, the target cell is a neuron or muscle cell. In some embodiments, the target cell is targeted in vivo. In some embodiments, the cell is in G1 and HR is suppressed. In some embodiments, use of KEAP1 depletion, for example inhibition of expression of KEAP1 activity, is preferred. KEAP1 depletion may be achieved through siRNA, for example as shown in Orthwein et al. Alternatively, expression of the PALB2-KR mutant (lacking all eight Lys residues in the BRCA1-interaction domain is preferred, either in combination with KEAP1 depletion or alone. PALB2-KR interacts with BRCA1 irrespective of cell cycle position. Thus, promotion or restoration of the BRCA1-PALB2 interaction, especially in G1 cells, is preferred in some embodiments, especially where the target cells are non-dividing, or where removal and return (ex vivo gene targeting) is problematic, for example neuron or muscle cells. KEAP1 siRNA is available from ThermoFischer. In some embodiments, a BRCA1-PALB2 complex may be delivered to the G1 cell. In some embodiments, PALB2 deubiquitylation may be promoted for example by increased expression of the deubiquitylase USP11, so it is envisaged that a construct may be provided to promote or up-regulate expression or activity of the deubiquitylase USP11.

### Treating Diseases of the Eye

[0923] In some embodiments, the disease to be treated is a disease that affects the eyes. Thus, in some embodiments, the CRISPR-Cas system or component thereof described herein is delivered to one or both eyes.

[0924] The CRISPR-Cas system can be used to correct ocular defects that arise from several genetic mutations further described in Genetic Diseases of the Eye, Second Edition, edited by Elias I. Traboulsi, Oxford University Press, 2012.

[0925] In some embodiments, the condition to be treated or targeted is an eye disorder. In some embodiments, the eye disorder may include glaucoma. In some embodiments, the eye disorder includes a retinal degenerative disease. In some embodiments, the retinal degenerative disease is selected from Stargardt disease, Bardet-Biedl Syndrome, Best disease, Blue Cone Monochromacy, Choroidermia, Cone-rod dystrophy, Congenital Stationary Night Blindness, Enhanced S-Cone Syndrome, Juvenile X-Linked Retinoschisis, Leber Congenital Amaurosis, Malattia Leventinesse, Norrie Disease or X-linked Familial Exudative Vitreoretinopathy, Pattern Dystrophy, Sorsby Dystrophy, Usher Syndrome, Retinitis Pigmentosa, Achromatopsia or Macular dystrophies or degeneration, Retinitis Pigmentosa, Achromatopsia, and age related macular degeneration. In some embodiments, the retinal degenerative disease is Leber Congenital Amaurosis (LCA) or Retinitis Pigmentosa. Other exemplary eye diseases are described in greater detail elsewhere herein.

[0926] In some embodiments, the CRISPR-Cas system is delivered to the eye, optionally via intravitreal injection or subretinal injection. Intraocular injections may be performed with the aid of an operating microscope. For subretinal and intravitreal injections, eyes may be prolapsed by gentle digital pressure and fundi visualized using a contact lens system consisting of a drop of a coupling medium solution on the cornea covered with a glass microscope slide coverslip. For subretinal injections, the tip of a 10-mm 34-gauge needle, mounted on a 5-μl Hamilton syringe may be advanced under direct visualization through the superior equatorial sclera tangentially towards the posterior pole until the aperture of the needle was visible in the subretinal space. Then, 2 μl of vector suspension may be injected to produce a superior bullous retinal detachment, thus confirming subretinal vector administration. This approach creates a self-sealing sclerotomy allowing the vector suspension to be retained in the subretinal space until it is absorbed by the RPE, usually within 48 h of the procedure. This procedure may be repeated in the inferior hemisphere to produce an inferior retinal detachment. This technique results in the exposure of approximately 70% of neurosensory retina and RPE to the vector suspension. For intravitreal injections, the needle tip may be advanced through the sclera 1 mm posterior to the corneoscleral limbus and 2 μl of vector suspension injected into the vitreous cavity. For intracameral injections, the needle tip may be advanced through a corneoscleral limbal paracentesis, directed towards the central cornea, and 2 μl of vector suspension may be injected. For intracameral injections, the needle tip may be advanced through a corneoscleral limbal paracentesis, directed towards the central cornea, and 2 μl of vector suspension may be injected. These vectors may be injected at titers of either 1.0-1.4×10¹⁰ or 1.0-1.4×10⁹ transducing units (TU)/ml.

[0927] In some embodiments, for administration to the eye, lentiviral vectors. In some embodiments, the lentiviral vector is an equine infectious anemia virus (EIAV) vector. Exemplary EIAV vectors for eye delivery are described in Balagaan, J Gene Med 2006; 8: 275-285, Published online 21 Nov. 2005 in Wiley InterScience (www.interscience.wiley.com). DOI: 10.1002/jgm.845; Binley et al., HUMAN GENE THERAPY 23:980-991 (September 2012), which can be adapted for use with the CRISPR-Cas system described herein. In some embodiments, the dosage can be 1.1×10⁵ transducing units per eye (TU/eye) in a total volume of 100 μl.

[0928] Other viral vectors can also be used for delivery to the eye, such as AAV vectors, such as those described in Campochiaro et al., Human Gene Therapy 17:167-176 (February 2006), Millington-Ward et al. (Molecular Therapy, vol. 19 no. 4, 642-649 April 2011; Dalkara et al. (Sci Transl Med 5, 189ra76 (2013)), which can be adapted for use with the CRISPR-Cas system described herein. In some embodiments, the dose can range from about 10⁶ to 10^{9.5} particle units. In the context of the Millington-Ward AAV vectors, a dose of about 2×10¹¹ to about 6×10¹³ virus particles can be administered. In the context of Dalkara vectors, a dose of about 1×10¹⁵ to about 1×10¹⁶ vg/ml administered to a human.

[0929] In some embodiments, the sd-rxRNA® system of RXi Pharmaceuticals may be used/and or adapted for delivering CRISPR-Cas system to the eye. In this system, a single intravitreal administration of 3 μg of sd-rxRNA results in sequence-specific reduction of PPIB mRNA levels for 14 days. The sd-rxRNA® system may be applied to the nucleic acid-targeting system of the present invention, contemplating a dose of about 3 to 20 mg of CRISPR administered to a human.

[0930] In other embodiments, the methods of US Patent Publication No. 20130183282, which is directed to methods of cleaving a target sequence from the human rhodopsin gene, may also be modified to the nucleic acid-targeting system of the present invention.

[0931] In other embodiments, the methods of US Patent Publication No. 20130202678 for treating retinopathies and sight-threatening ophthalmologic disorders relating to delivering of the Puf-A gene (which is expressed in retinal ganglion and pigmented cells of eye tissues and displays a unique anti-apoptotic activity) to the sub-retinal or intravitreal space in the eye. In particular, desirable targets are zgc:193933, prdm1a, spata2, tex10, rbb4, ddx3, zp2.2, Blimp-1 and HtrA2, all of which may be targeted by the CRISPR-Cas system of the present invention.

[0932] Wu (Cell Stem Cell, 13:659-62, 2013) designed a guide RNA that led Cas9 to a single base pair mutation that causes cataracts in mice, where it induced DNA cleavage. Then using either the other wild-type allele or oligos given to the zygotes repair mechanisms corrected the sequence of the broken allele and corrected the cataract-causing genetic defect in mutant mouse. This approach can be adapted to and/or applied to the small Type II-D CRISPR-Cas systems described herein.

[0933] US Patent Publication No. 20120159653, describes use of zinc finger nucleases to genetically modify cells, animals and proteins associated with macular degeneration (MD), the teachings of which can be applied to and/or adapted for the CRISPR-Cas systems described herein.

[0934] One aspect of US Patent Publication No. 20120159653 relates to editing of any chromosomal sequences that encode proteins associated with MD which may be applied to the nucleic acid-targeting system of the present invention.

### Treating Muscle Diseases and Cardiovascular Diseases

[0935] In some embodiments, the CRISPR-Cas system can be used to treat and/or prevent a muscle disease and associated circulatory or cardiovascular disease or disorder. The present invention also contemplates delivering the CRISPR-Cas system described herein, e.g. Cas effector protein systems, to the heart. For the heart, a myocardium tropic adeno-associated virus (AAVM) is preferred, in particular AAVM41 which showed preferential gene transfer in the heart (see, e.g., Lin-Yanga et al., PNAS, Mar. 10, 2009, vol. 106, no. 10). Administration may be systemic or local. A dosage of about 1-10×1014 vector genomes are contemplated for systemic administration. See also, e.g., Eulalio et al. (2012) Nature 492: 376 and Somasuntharam et al. (2013) Biomaterials 34: 7790, the teachings of which can be adapted for and/or applied to the CRISPR-Cas systems described herein.

[0936] For example, US Patent Publication No. 20110023139, the teachings of which can be adapted for and/or applied to the CRISPR-Cas systems described herein describes use of zinc finger nucleases to genetically modify cells, animals and proteins associated with cardiovascular disease. Cardiovascular diseases generally include high blood pressure, heart attacks, heart failure, and stroke and TIA. Any chromosomal sequence involved in cardiovascular disease or the protein encoded by any chromosomal sequence involved in cardiovascular disease may be utilized in the methods described in this disclosure. The cardiovascular-related proteins are typically selected based on an experimental association of the cardiovascular-related protein to the development of cardiovascular disease. For example, the production rate or circulating concentration of a cardiovascular-related protein may be elevated or depressed in a population having a cardiovascular disorder relative to a population lacking the cardiovascular disorder. Differences in protein levels may be assessed using proteomic techniques including but not limited to Western blot, immunohistochemical staining, enzyme linked immunosorbent assay (ELISA), and mass spectrometry. Alternatively, the cardiovascular-related proteins may be identified by obtaining gene expression profiles of the genes encoding the proteins using genomic techniques including but not limited to DNA microarray analysis, serial analysis of gene expression (SAGE), and quantitative real-time polymerase chain reaction (Q-PCR).

[0937] The CRISPR-Cas systems herein can be used for treating diseases of the muscular system. The present invention also contemplates delivering the CRISPR-Cas system described herein, e.g., small Type II-D Cas effector protein systems, to muscle(s).

[0938] In some embodiments, the muscle disease to be treated is a muscle dystrophy such as DMD. In some embodiments, the CRISPR-Cas system, such as a system capable of RNA modification, described herein can be used to achieve exon skipping to achieve correction of the diseased gene. As used herein, the term “exon skipping” refers to the modification of pre-mRNA splicing by the targeting of splice donor and/or acceptor sites within a pre-mRNA with one or more complementary antisense oligonucleotide(s) (AONs). By blocking access of a spliceosome to one or more splice donor or acceptor site, an AON may prevent a splicing reaction thereby causing the deletion of one or more exons from a fully-processed mRNA. Exon skipping may be achieved in the nucleus during the maturation process of pre-mRNAs. In some examples, exon skipping may include the masking of key sequences involved in the splicing of targeted exons by using a CRISPR-Cas system described herein capable of RNA modification. In some embodiments, exon skipping can be achieved in dystrophin mRNA. In some embodiments, the CRISPR-Cas system can induce exon skipping at exon 1, 2, 3, 4, 5, 6, 7, 8, 10, 11, 12, 13, 14, 15, 16, 17, 18, 19, 20, 21, 22, 23, 24, 25, 26, 27, 28, 29, 30, 31, 32, 33, 34, 45, 36, 37, 38, 39, 40, 41, 42, 43, 44, 45, 46, 47, 48, 49, 50, 51, 52, 53, 54, 55, 56, 57, 58, 59, 60, 61, 62, 63, 64, 65, 66, 67, 68, 69, 70, 71, 72, 73, 74, 75, 76, 77, 78, 79, or any combination thereof of the dystrophin mRNA. In some embodiments, the CRISPR-Cas system can induce exon skipping at exon 43, 44, 50, 51, 52, 55, or any combination thereof of the dystrophin mRNA. Mutations in these exons, can also be corrected using non-exon skipping polynucleotide modification methods.

[0939] In some embodiments, for treatment of a muscle disease, the method of Bortolanza et al. Molecular Therapy vol. 19 no. 11, 2055-264 November 2011) may be applied to an AAV expressing CRISPR Cas and injected into humans at a dosage of about 2×10¹⁵ or 2×10¹⁶ vg of vector. The teachings of Bortolanza et al., can be adapted for and/or applied to the CRISPR-Cas systems described herein.

[0940] In some embodiments, the method of Dumonceaux et al. (Molecular Therapy vol. 18 no. 5, 881-887 May 2010) may be applied to an AAV expressing CRISPR Cas and injected into humans, for example, at a dosage of about 10¹⁴ to about 10¹⁵ vg of vector. The teachings of Dumonceaux described herein can be adapted for and/or applied to the CRISPR-Cas systems described herein.

[0941] In some embodiments, the method of Kinouchi et al. (Gene Therapy (2008) 15, 1126-1130) may be applied to CRISPR Cas systems described herein and injected into a human, for example, at a dosage of about 500 to 1000 ml of a 40 μM solution into the muscle.

[0942] In some embodiments, the method of Hagstrom et al. (Molecular Therapy Vol. 10, No. 2, August 2004) can be adapted for and/or applied to the CRISPR-Cas systems herein and injected at a dose of about 15 to about 50 mg into the great saphenous vein of a human.

### Treating Diseases of the Liver and Kidney

[0943] In some embodiments, the CRISPR-Cas system or component thereof described herein can be used to treat a disease of the kidney or liver. Thus, in some embodiments, delivery of the CRISRP-Cas system or component thereof described herein is to the liver or kidney.

[0944] Delivery strategies to induce cellular uptake of the therapeutic nucleic acid include physical force or vector systems such as viral-, lipid- or complex-based delivery, or nanocarriers. From the initial applications with less possible clinical relevance, when nucleic acids were addressed to renal cells with hydrodynamic high-pressure injection systemically, a wide range of gene therapeutic viral and non-viral carriers have been applied already to target posttranscriptional events in different animal kidney disease models in vivo (Csaba Revesz and Peter Hamar (2011). Delivery Methods to Target RNAs in the Kidney, Gene Therapy Applications, Prof Chunsheng Kang (Ed.), ISBN: 978-953-307-541-9, InTech, Available from: www.intechopen.com/books/gene-therapy-applications/delivery-methods-to-target-rnas-inthe-kidney). Delivery methods to the kidney may include those in Yuan et al. (Am J Physiol Renal Physiol 295: F605-F617, 2008). The method of Yuang et al. may be applied to the CRISPR Cas system of the present invention contemplating a 1-2 g subcutaneous injection of CRISPR Cas conjugated with cholesterol to a human for delivery to the kidneys. In some embodiments, the method of Molitoris et al. (J Am Soc Nephrol 20: 1754-1764, 2009) can be adapted to the CRISRP-Cas system of the present invention and a cumulative dose of 12-20 mg/kg to a human can be used for delivery to the proximal tubule cells of the kidneys. In some embodiments, the methods of Thompson et al. (Nucleic Acid Therapeutics, Volume 22, Number 4, 2012) can be adapted to the CRISRP-Cas system of the present invention and a dose of up to 25 mg/kg can be delivered via i.v. administration. In some embodiments, the method of Shimizu et al. (J Am Soc Nephrol 21: 622-633, 2010) can be adapted to the CRISRP-Cas system of the present invention and a dose of about of 10-20 μmol CRISPR Cas complexed with nanocarriers in about 1-2 liters of a physiologic fluid for i.p. administration can be used.

[0945] Other various delivery vehicles can be used to deliver the CRISPR-Cas system to the kidney such as viral, hydrodynamic, lipid, polymer nanoparticles, aptamers and various combinations thereof (see e.g. Larson et al., Surgery, (August 2007), Vol. 142, No. 2, pp. (262-269); Hamar et al., Proc Natl Acad Sci, (October 2004), Vol. 101, No. 41, pp. (14883-14888); Zheng et al., Am J Pathol, (October 2008), Vol. 173, No. 4, pp. (973-980); Feng et al., Transplantation, (May 2009), Vol. 87, No. 9, pp. (1283-1289); Q. Zhang et al., PloS ONE, (July 2010), Vol. 5, No. 7, e11709, pp. (1-13); Kushibikia et al., J Controlled Release, (July 2005), Vol. 105, No. 3, pp. (318-331); Wang et al., Gene Therapy, (July 2006), Vol. 13, No. 14, pp. (1097-1103); Kobayashi et al., Journal of Pharmacology and Experimental Therapeutics, (February 2004), Vol. 308, No. 2, pp. (688-693); Wolfrum et al., Nature Biotechnology, (September 2007), Vol. 25, No. 10, pp. (1149-1157); Molitoris et al., J Am Soc Nephrol, (August 2009), Vol. 20, No. 8 pp. (1754-1764); Mikhaylova et al., Cancer Gene Therapy, (March 2011), Vol. 16, No. 3, pp. (217-226); Y. Zhang et al., J Am Soc Nephrol, (April 2006), Vol. 17, No. 4, pp. (1090-1101); Singhal et al., Cancer Res, (May 2009), Vol. 69, No. 10, pp. (4244-4251); Malek et al., Toxicology and Applied Pharmacology, (April 2009), Vol. 236, No. 1, pp. (97-108); Shimizu et al., J Am Soc Nephrology, (April 2010), Vol. 21, No. 4, pp. (622-633); Jiang et al., Molecular Pharmaceutics, (May-June 2009), Vol. 6, No. 3, pp. (727-737); Cao et al, J Controlled Release, (June 2010), Vol. 144, No. 2, pp. (203-212); Ninichuk et al., Am J Pathol, (March 2008), Vol. 172, No. 3, pp. (628-637); Purschke et al., Proc Natl Acad Sci, (March 2006), Vol. 103, No. 13, pp. (5173-5178).

[0946] In some embodiments, delivery is to liver cells. In some embodiments, the liver cell is a hepatocyte. Delivery of the CRISPR protein, such as Cas effector (e.g., small Type II-D Cas) herein may be via viral vectors, especially AAV (and in particular AAV2/6) vectors. These can be administered by intravenous injection. A preferred target for the liver, whether in vitro or in vivo, is the albumin gene. This is a so-called ‘safe harbor” as albumin is expressed at very high levels and so some reduction in the production of albumin following successful gene editing is tolerated. It is also preferred as the high levels of expression seen from the albumin promoter/enhancer allows for useful levels of correct or transgene production (from the inserted donor template) to be achieved even if only a small fraction of hepatocytes are edited. See sites identified by Wechsler et al. (reported at the 57th Annual Meeting and Exposition of the American Society of Hematology—abstract available online at https.//ash.confex.com/ash/2015/webprogram/Paper86495.html and presented on 6th December 2015) which can be adapted for use with the CRISPR-Cas systems herein.

[0947] Exemplary liver and kidney diseases that can be treated and/or prevented are described elsewhere herein.

### Treating Epithelial and Lung Diseases

[0948] In some embodiments, the disease treated or prevented by the CRISPR-Cas system described herein can be a lung or epithelial disease. The CRISPR-Cas systems described herein can be used for treating epithelial and/or lung diseases. The present invention also contemplates delivering the CRISPR-Cas system described herein, e.g., small Type II-D Cas effector systems, to one or both lungs.

[0949] In some embodiments, as viral vector can be used to deliver the CRISPR-Cas system or component thereof to the lungs. In some embodiments, the AAV is an AAV-1, AAV-2, AAV-5, AAV-6, and/or AAV-9 for delivery to the lungs. (see, e.g., Li et al., Molecular Therapy, vol. 17 no. 12, 2067-277 December 2009). In some embodiments, the MOI can vary from 1×10³ to 4×10⁵ vector genomes/cell. In some embodiments, the delivery vector can be an RSV vector as in Zamora et al. (Am J Respir Crit Care Med Vol 183. pp 531-538, 2011. The method of Zamora et al. may be applied to the nucleic acid-targeting system of the present invention and an aerosolized CRISPR Cas, for example with a dosage of 0.6 mg/kg, may be contemplated for the present invention.

[0950] Subjects treated for a lung disease may for example receive pharmaceutically effective amount of aerosolized AAV vector system per lung endobronchially delivered while spontaneously breathing. As such, aerosolized delivery is preferred for AAV delivery in general. An adenovirus or an AAV particle may be used for delivery. Suitable gene constructs, each operably linked to one or more regulatory sequences, may be cloned into the delivery vector. In this instance, the following constructs are provided as examples: Cbh or EF1a promoter for Cas (small Type II-D Cas), U6 or H1 promoter for guide RNA). A preferred arrangement is to use a CFTRdelta508 targeting guide, a repair template for deltaF508 mutation and a codon optimized Cas (e.g., small Type II-D Cas) enzyme, with optionally one or more nuclear localization signal or sequence(s) (NLS(s)), e.g., two (2) NLSs.

### Treating Diseases of the Skin

[0951] The CRISPR-Cas systems described herein can be used for the treatment of skin diseases. The present invention also contemplates delivering the CRISPR-Cas system described herein, e.g., small Type II-D Cas effector protein systems, to the skin.

[0952] In some embodiments, delivery to the skin (intradermal delivery) of the CRISPR-Cas system or component thereof can be via one or more microneedles or microneedle containing device. For example, in some embodiments the device and methods of Hickerson et al. (Molecular Therapy—Nucleic Acids (2013) 2, e129) can be used and/or adapted to deliver the CRISPR-Cas system described herein, for example, at a dosage of up to 300 μl of 0.1 mg/ml CRISPR-Cas (e.g., small Type II-D Cas) system to the skin.

[0953] In some embodiments, the methods and techniques of Leachman et al. (Molecular Therapy, vol. 18 no. 2, 442-446 February 2010) can be used and/or adapted for delivery of a CRIPSR-Cas system described herein to the skin.

[0954] In some embodiments, the methods and techniques of Zheng et al. (PNAS, Jul. 24, 2012, vol. 109, no. 30, 11975-11980) can be used and/or adapted for nanoparticle delivery of a CRIPSR-Cas system described herein to the skin. In some embodiments, as dosage of about 25 nM applied in a single application can achieve gene knockdown in the skin.

### Treating Cancer

[0955] The CRISPR-Cas systems described herein can be used for the treatment of cancer. The present invention also contemplates delivering the CRISPR-Cas system described herein, e.g., small Type II-D Cas effector protein systems, to a cancer cell. Also, as is described elsewhere herein the CRISPR-Cas systems can be used to modify an immune cell, such as a CAR or CAR T cell, which can then in turn be used to treat and/or prevent cancer. This is also described in WO2015161276, the disclosure of which is hereby incorporated by reference and described herein below.

[0956] Target genes suitable for the treatment or prophylaxis of cancer can include those set forth in Tables 11 and 12 and those identified at mitoMap.org. In some embodiments, target genes for cancer treatment and prevention can also include those described in WO2015048577 the disclosure of which is hereby incorporated by reference and can be adapted for and/or applied to the CRISPR-Cas system described herein.

### Diseases

[0957] Genetic Diseases and Diseases with a Genetic and/or Epigenetic Aspect

[0958] The CRISPR-Cas systems or components thereof can be used to treat and/or prevent a genetic disease or a disease with a genetic and/or epigenetic aspect. The genes and conditions exemplified herein are not exhaustive. In some embodiments, a method of treating and/or preventing a genetic disease can include administering a CRISPR-Cas system and/or one or more components thereof to a subject, where the CRISPR-Cas system and/or one or more components thereof is capable of modifying one or more copies of one or more genes associated with the genetic disease or a disease with a genetic and/or epigenetic aspect in one or more cells of the subject. In some embodiments, modifying one or more copies of one or more genes associated with a genetic disease or a disease with a genetic and/or epigenetic aspect in the subject can eliminate a genetic disease or a symptom thereof in the subject. In some embodiments, modifying one or more copies of one or more genes associated with a genetic disease or a disease with a genetic and/or epigenetic aspect in the subject can decrease the severity of a genetic disease or a symptom thereof in the subject. In some embodiments, the CRISPR-Cas systems or components thereof can modify one or more genes or polynucleotides associated with one or more diseases, including genetic diseases and/or those having a genetic aspect and/or epigenetic aspect, including but not limited to, any one or more set forth in Table 11. It will be appreciated that those diseases and associated genes listed herein are non-exhaustive and non-limiting. Further some genes play roles in the development of multiple diseases.

| | Primary | Additional | |
|---|---|---|---|
| | Tissues or | Tissues/ | |
| | System | Systems | |
| Disease Name | Affected | Affected | Genes |
| Achondroplasia | Bone and | | fibroblast growth factor receptor 3 |
| | Muscle | | (FGFR3) |
| Achromatopsia | eye | | CNGA3, CNGB3, GNAT2, PDE6C, |
| | | | PDE6H, ACHM2, ACHM3, |
| Acute Renal Injury | kidney | | NFkappaB, AATF, p85alpha, FAS, |
| | | | Apoptosis cascade elements (e.g. |
| | | | FASR, Caspase 2, 3, 4, 6, 7, 8, 9, 10, |
| | | | AKT, TNF alpha, IGF1, IGF1R, |
| | | | RIPK1), p53 |
| Age Related Macular | eye | | Abcr; CCL2; CC2; CP |
| Degeneration | | | (ceruloplasmin); Timp3; cathepsinD; |
| | | | VLDLR, CCR2 |
| AIDS | Immune System | | KIR3DL1, NKAT3, NKB1, AMB11, |
| | | | KIR3DS1, IFNG, CXCL12, SDF1 |
| Albinism (including | Skin, hair, eyes, | | TYR, OCA2, TYRP1, and SLC45A2, |
| oculocutaneous albinism (types | | | SLC24A5 and C10orf11 |
| 1-7) and ocular albinism) | | | |
| Alkaptonuria | Metabolism of | Tissues/organs | HGD |
| | amino acids | where | |
| | | homogentisic | |
| | | acid | |
| | | accumulates, | |
| | | particularly | |
| | | cartilage (joints), | |
| | | heart valves, | |
| | | kidneys | |
| alpha-1 antitrypsin deficiency | Lung | Liver, skin, | SERPINA1, those set forth in |
| (AATD or A1AD) | | vascular system, | WO2017165862, PiZ allele |
| | | kidneys, GI | |
| ALS | CNS | | SOD1; ALS2; ALS3; ALS5; |
| | | | ALS7;STEX; FUS; TARDBP; VEGF |
| | | | (VEGF-a; |
| | | | VEGF-b; VEGF-c); DPP6; NEFH, |
| | | | PTGS1, SLC1A2, TNFRSF10B, |
| | | | PRPH, HSP90AA1, CRIA2, IFNG, |
| | | | AMPA2 S100B, FGF2, AOX1, CS, |
| | | | TXN, RAPHJ1, MAP3K5, NBEAL1, |
| | | | GPX1, ICA1L, RAC1, MAPT, ITPR2, |
| | | | ALS2CR4, GLS, ALS2CR8, CNTFR, |
| | | | ALS2CR11, FOLH1, FAM117B, |
| | | | P4HB, CNTF, SQSTM1, STRADB, |
| | | | NAIP, NLR, YWHAQ, SLC33A1, |
| | | | TRAK2, SCA1, NIF3L1, NIF3, |
| | | | PARD3B, COX8A, CDK15, HECW1, |
| | | | HECT, C2, WW 15, NOS1, MET, |
| | | | SOD2, HSPB1, NEFL, CTSB, ANG, |
| | | | HSPA8, RNase A, VAPB, VAMP, |
| | | | SNCA, alpha HGF, CAT, ACTB, |
| | | | NEFM, TH, BCL2, FAS, CASP3, |
| | | | CLU, SMN1, G6PD, BAX, HSF1, |
| | | | RNF19A, JUN, ALS2CR12, HSPA5, |
| | | | MAPK14, APEX1, TXNRD1, NOS2, |
| | | | TIMP1, CASP9, XIAP, GLG1, EPO, |
| | | | VEGFA, ELN, GDNF, NFE2L2, |
| | | | SLC6A3, HSPA4, APOE, PSMB8, |
| | | | DCTN2, TIMP3, KIFAP3, SLC1A1, |
| | | | SMN2, CCNC, STUB1, ALS2, |
| | | | PRDX6, SYP, CABIN1, CASP1, |
| | | | GART, CDK5, ATXN3, RTN4, |
| | | | C1QB, VEGFC, HTT, PARK7, XDH, |
| | | | GFAP, MAP2, CYCS, FCGR3B, CCS, |
| | | | UBL5, MMP9m SLC18A3, TRPM7, |
| | | | HSPB2, AKT1, DEERL1, CCL2, |
| | | | NGRN, GSR, TPPP3, APAF1, |
| | | | BTBD10, GLUD1, CXCR4, S:C1A3, |
| | | | FLT1, PON1, AR, LIF, ERBB3, |
| | | | :GA:S1, CD44, TP53, TLR3, GRIA1, |
| | | | GAPDH, AMPA, GRIK1, DES, |
| | | | CHAT, FLT4, CHMP2B, BAG1, |
| | | | CHRNA4, GSS, BAK1, KDR, GSTP1, |
| | | | OGG1, IL6 |
| Alzheimer's Disease | Brain | | E1; CHIP; UCH; UBB; Tau; LRP; |
| | | | PICALM; CLU; PS1; |
| | | | SORL1; CR1; VLDLR; UBA1; |
| | | | UBA3; CHIP28; AQP1; UCHL1; |
| | | | UCHL3; APP, AAA, CVAP, AD1, |
| | | | APOE, AD2, DCP1, ACE1, MPO, |
| | | | PACIP1, PAXIP1L, PTIP, A2M, |
| | | | BLMH, BMH, PSEN1, AD3, ALAS2, |
| | | | ABCA1, BIN1, BDNF, BTNL8, |
| | | | C1ORF49, CDH4, CHRNB2, |
| | | | CKLFSF2, CLEC4E, CR1L, CSF3R, |
| | | | CST3, CYP2C, DAPK1, ESR1, |
| | | | FCAR, FCGR3B, FFA2, FGA, GAB2, |
| | | | GALP, GAPDHS, GMPB, HP, HTR7, |
| | | | IDE, IF127, IFI6, IFIT2, IL1RN, IL- |
| | | | IRA, IL8RA, IL8RB, JAG1, KCNJ15, |
| | | | LRP6, MAPT, MARK4, MPHOSPH1, |
| | | | MTHFR, NBN, NCSTN, NIACR2, |
| | | | NMNAT3, NTM, ORM1, P2RY13, |
| | | | PBEF1, PCK1, PICALM, PLAU, |
| | | | PLXNC1, PRNP, PSEN1, PSEN2, |
| | | | PTPRA, RALGPS2, RGSL2, |
| | | | SELENBP1, SLC25A37, SORL1, |
| | | | Mitoferrin-1, TF, TFAM, TNF, |
| | | | TNFRSF10C, UBE1C |
| Amyloidosis | | | APOA1, APP, AAA, CVAP, AD1, |
| | | | GSN, FGA, LYZ, TTR, PALB |
| Amyloid neuropathy | | | TTR, PALB |
| Anemia | Blood | | CDAN1, CDA1, RPS19, DBA, PKLR, |
| | | | PK1, NT5C3, UMPH1, PSN1, RHAG, |
| | | | RH50A, NRAMP2, SPTB, ALAS2, |
| | | | ANH1, ASB, ABCB7, ABC7, ASAT |
| Angelman Syndrome | Nervous system, | | UBE3A |
| | brain | | |
| Attention Deficit Hyperactivity | Brain | | PTCHD1 |
| Disorder (ADHD) | | | |
| Autoimmune lymphoproliferative | Immune system | | TNFRSF6, APT1, FAS, CD95, |
| syndrome | | | ALPS1A |
| Autism, Autism spectrum | Brain | | PTCHD1; Mecp2; BZRAP1; MDGA2; |
| disorders (ASDs), including | | | Sema5A; Neurexin 1; GLO1, RTT, |
| Asperger's and a general | | | PPMX, MRX16, RX79, NLGN3, |
| diagnostic category called | | | NLGN4, KIAA1260, AUTSX2, |
| Pervasive Developmental | | | FMR1, FMR2; FXR1; FXR2; |
| Disorders (PDDs) | | | MGLUR5, ATP10C, CDH10, GRM6, |
| | | | MGLUR6, CDH9, CNTN4, NLGN2, |
| | | | CNTNAP2, SEMA5A, DHCR7, |
| | | | NLGN4X, NLGN4Y, DPP6, NLGN5, |
| | | | EN2, NRCAM, MDGA2, NRXN1, |
| | | | FMR2, AFF2, FOXP2, OR4M2, |
| | | | OXTR, FXR1, FXR2, PAH, |
| | | | GABRA1, PTEN, GABRA5, PTPRZ1, |
| | | | GABRB3, GABRG1, HIRIP3, |
| | | | SEZ6L2, HOXA1, SHANK3, IL6, |
| | | | SHBZRAP1, LAMB1, SLC6A4, |
| | | | SERT, MAPK3, TAS2R1, MAZ, |
| | | | TSC1, MDGA2, TSC2, MECP2, |
| | | | UBE3A, WNT2, see also |
| | | | 20110023145 |
| autosomal dominant polycystic | kidney | liver | PKD1, PKD2 |
| kidney disease (ADPKD)- | | | |
| (includes diseases such as von | | | |
| Hippel-Lindau disease and | | | |
| tuberous sclerosis complex | | | |
| disease) | | | |
| Autosomal Recessive Polycystic | kidney | liver | PKDH1 |
| Kidney Disease (ARPKD) | | | |
| Ataxia-Telangiectasia (a.k.a. | Nervous system, | various | ATM |
| Louis Bar syndrome) | immune system | | |
| B-Cell Non-Hodgkin Lymphoma | | | BCL7A, BCL7 |
| Bardet-Biedl syndrome | Eye, | Liver, ear, | ARL6, BBS1, BBS2, BBS4, BBS5, |
| | musculoskeletal | gastrointestinal | BBS7, BBS9, BBS10, BBS12, |
| | system, kidney, | system, brain | CEP290, INPP5E, LZTFL1, MKKS, |
| | reproductive | | MKS1, SDCCAG8, TRIM32, TTC8 |
| | organs | | |
| Bare Lymphocyte Syndrome | blood | | TAPBP, TPSN, TAP2, ABCB3, PSF2, |
| | | | RING11, MHC2TA, C2TA, RFX5, |
| | | | RFXAP, RFX5 |
| Bartter's Syndrome (types I, II, | kidney | | SLC12A1 (type I), KCNJ1 (type II), |
| III, IVA and B, and V) | | | CLCNKB (type III), BSND (type IV |
| | | | A), or both the CLCNKA CLCNKB |
| | | | genes (type IV B), CASR (type V). |
| Becker muscular dystrophy | Muscle | | DMD, BMD, MYF6 |
| Best Disease (Vitelliform | eye | | VMD2 |
| Macular Dystrophy type 2) | | | |
| Bleeding Disorders | blood | | TBXA2R, P2RX1, P2X1 |
| Blue Cone Monochromacy | eye | | OPN1LW, OPN1MW, and LCR |
| Breast Cancer | Breast tissue | | BRCA1, BRCA2, COX-2 |
| Bruton's Disease (aka X-linked | Immune system, | | BTK |
| Agammglobulinemia) | specifically B | | |
| | cells | | |
| Cancers (e.g., lymphoma, chronic | Various | | FAS, BID, CTLA4, PDCD1, CBLB, |
| lymphocytic leukemia (CLL), B | | | PTPN6, TRAC, TRBC, those |
| cell acute lymphocytic leukemia | | | described in WO2015048577 |
| (B-ALL), acute lymphoblastic | | | |
| leukemia, acute myeloid | | | |
| leukemia, non-Hodgkin's | | | |
| lymphoma (NHL), diffuse large | | | |
| cell lymphoma (DLCL), multiple | | | |
| myeloma, renal cell carcinoma | | | |
| (RCC), neuroblastoma, colorectal | | | |
| cancer, breast cancer, ovarian | | | |
| cancer, melanoma, sarcoma, | | | |
| prostate cancer, lung cancer, | | | |
| esophageal cancer, hepatocellular | | | |
| carcinoma, pancreatic cancer, | | | |
| astrocytoma, mesothelioma, head | | | |
| and neck cancer, and | | | |
| medulloblastoma | | | |
| Cardiovascular Diseases | heart | Vascular system | IL1B, XDH, TP53, PTGS, MB, IL4, |
| | | | ANGPT1, ABCGu8, CTSK, PTGIR, |
| | | | KCNJ11, INS, CRP, PDGFRB, |
| | | | CCNA2, PDGFB, KCNJ5, KCNN3, |
| | | | CAPN10, ADRA2B, ABCG5, |
| | | | PRDX2, CPAN5, PARP14, MEX3C, |
| | | | ACE, RNF, IL6, TNF, STN, |
| | | | SERPINE1, ALB, ADIPOQ, APOB, |
| | | | APOE, LEP, MTHFR, APOA1, |
| | | | EDN1, NPPB, NOS3, PPARG, PLAT, |
| | | | PTGS2, CETP, AGTR1, HMGCR, |
| | | | IGF1, SELE, REN, PPARA, PON1, |
| | | | KNG1, CCL2, LPL, VWF, F2, |
| | | | ICAM1, TGFB, NPPA, IL10, EPO, |
| | | | SOD1, VCAM1, IFNG, LPA, MPO, |
| | | | ESR1, MAPK, HP, F3, CST3, COG2, |
| | | | MMP9, SERPINC1, F8, HMOX1, |
| | | | APOC3, IL8, PROL1, CBS, NOS2, |
| | | | TLR4, SELP, ABCA1, AGT, LDLR, |
| | | | GPT, VEGFA, NR3C2, IL18, NOS1, |
| | | | NR3C1, FGB, HGF, IL1A, AKT1, |
| | | | LIPC, HSPD1, MAPK14, SPP1, |
| | | | ITGB3, CAT, UTS2, THBD, F10, CP, |
| | | | TNFRSF11B, EGFR, MMP2, PLG, |
| | | | NPY, RHOD, MAPK8, MYC, FN1, |
| | | | CMA1, PLAU, GNB3, ADRB2, |
| | | | SOD2, F5, VDR, ALOX5, HLA- |
| | | | DRB1, PARP1, CD40LG, PON2, |
| | | | AGER, IRS1, PTGS1, ECE1, F7, |
| | | | IRMN, EPHX2, IGFBP1, MAPK10, |
| | | | FAS, ABCB1, JUN, IGFBP3, CD14, |
| | | | PDE5A, AGTR2, CD40, LCAT, |
| | | | CCR5, MMP1, TIMP1, ADM, |
| | | | DYT10, STAT3, MMP3, ELN, USF1, |
| | | | CFH, HSPA4, MMP12, MME, F2R, |
| | | | SELL, CTSB, ANXA5, ADRB1, |
| | | | CYBA, FGA, GGT1, LIPG, HIF1A, |
| | | | CXCR4, PROC, SCARB1, CD79A, |
| | | | PLTP, ADD1, FGG, SAA1, KCNH2, |
| | | | DPP4, NPR1, VTN, KIAA0101, FOS, |
| | | | TLR2, PPIG, IL1R1, AR, CYP1A1, |
| | | | SERPINA1, MTR, RBP4, APOA4, |
| | | | CDKN2A, FGF2, EDNRB, ITGA2, |
| | | | VLA-2, CABIN1, SHBG, HMGB1, |
| | | | HSP90B2P, CYP3A4, GJA1, CAV1, |
| | | | ESR2, LTA, GDF15, BDNF, |
| | | | CYP2D6, NGF, SP1, TGIF1, SRC, |
| | | | EGF, PIK3CG, HLA-A, KCNQ1, |
| | | | CNR1, FBN1, CHKA, BEST1, |
| | | | CTNNB1, IL2, CD36, PRKAB1, TPO, |
| | | | ALDH7A1, CX3CR1, TH, F9, CH1, |
| | | | TF, HFE, IL17A, PTEN, GSTM1, |
| | | | DMD, GATA4, F13A1, TTR, FABP4, |
| | | | PON3, APOC1, INSR, TNFRSF1B, |
| | | | HTR2A, CSF3, CYP2C9, TXN, |
| | | | CYP11B2, PTH, CSF2, KDR, |
| | | | PLA2G2A, THBS1, GCG, RHOA, |
| | | | ALDH2, TCF7L2, NFE2L2, |
| | | | NOTCH1, UGT1A1, IFNA1, PPARD, |
| | | | SIRT1, GNHR1, PAPPA, ARR3, |
| | | | NPPC, AHSP, PTK2, IL13, MTOR, |
| | | | ITGB2, GSTT1, IL6ST, CPB2, |
| | | | CYP1A2, HNF4A, SLC64A, |
| | | | PLA2G6, TNFSF11, SLC8A1, F2RL1, |
| | | | AKR1A1, ALDH9A1, BGLAP, |
| | | | MTTP, MTRR, SULT1A3, RAGE, |
| | | | C4B, P2RY12, RNLS, CREB1, |
| | | | POMC, RAC1, LMNA, CD59, |
| | | | SCM5A, CYP1B1, MIF, MMP13, |
| | | | TIMP2, CYP19A1, CUP21A2, |
| | | | PTPN22, MYH14, MBL2, SELPLG, |
| | | | AOC3, CTSL1, PCNA, IGF2, ITGB1, |
| | | | CAST, CXCL12, IGHE, KCNE1, |
| | | | TFRC, COL1A1, COL1A2, IL2RB, |
| | | | PLA2G10, ANGPT2, PROCR, NOX4, |
| | | | HAMP, PTPN11, SLCA1, IL2RA, |
| | | | CCL5, IRF1, CF:AR, CA:CA, EIF4E, |
| | | | GSTP1, JAK2, CYP3A5, HSPG2, |
| | | | CCL3, MYD88, VIP, SOAT1, |
| | | | ADRBK1, NR4A2, MMP8, NPR2, |
| | | | GCH1, EPRS, PPARGC1A, F12, |
| | | | PECAM1, CCL4, CERPINA34, |
| | | | CASR, FABP2, TTF2, PROS1, CTF1, |
| | | | SGCB, YME1L1, CAMP, ZC3H12A, |
| | | | AKR1B1, MMP7, AHR, CSF1, |
| | | | HDAC9, CTGF, KCNMA1, UGT1A, |
| | | | PRKCA, COMT, S100B, EGR1, PRL, |
| | | | IL15, DRD4, CAMK2G, SLC22A2, |
| | | | CCL11, PGF, THPO, GP6, TACR1, |
| | | | NTS, HNF1A, SST, KCDN1, |
| | | | LOC646627, TBXAS1, CUP2J2, |
| | | | TBXA2R, ADH1C, ALOX12, AHSG, |
| | | | BHMT, GJA4, SLC25A4, ACLY, |
| | | | ALOX5AP, NUMA1, CYP27B1, |
| | | | CYSLTR2, SOD3, LTC4S, UCN, |
| | | | GHRL, APOC2, CLEC4A, |
| | | | KBTBD10, TNC, TYMS, SHC1, |
| | | | LRP1, SOCS3, ADH1B, KLK3, |
| | | | HSD11B1, VKORC1, SERPINB2, |
| | | | TNS1, RNF19A, EPOR, ITGAM, |
| | | | PITX2, MAPK7, FCGR3A, LEEPR, |
| | | | ENG, GPX1, GOT2, HRH1, NR112, |
| | | | CRH, HTR1A, VDAC1, HPSE, |
| | | | SFTPD, TAP2, RMF123, PTK2Bm |
| | | | NTRK2, IL6R, ACHE, GLP1R, GHR, |
| | | | GSR, NQO1, NR5A1, GJB2, |
| | | | SLC9A1, MAOA, PCSK9, FCGR2A, |
| | | | SERPINF1, EDN3, UCP2, TFAP2A, |
| | | | C4BPA, SERPINF2, TYMP, ALPP, |
| | | | CXCR2, SLC3A3, ABCG2, ADA, |
| | | | JAK3, HSPA1A, FASN, FGF1, F11, |
| | | | ATP7A, CR1, GFPA, ROCK1, |
| | | | MECP2, MYLK, BCHE, LIPE, |
| | | | ADORA1, WRN, CXCR3, CD81, |
| | | | SMAD7, LAMC2, MAP3K5, CHGA, |
| | | | IAPP, RHO, ENPP1, PTHLH, NRG1, |
| | | | VEGFC, ENPEP, CEBPB, NAGLU,. |
| | | | F2RL3, CX3CL1, BDKRB1, |
| | | | ADAMTS13, ELANE, ENPP2, CISH, |
| | | | GAST, MYOC, ATP1A2, NF1, GJB1, |
| | | | MEF2A, VCL, BMPR2, TUBB, |
| | | | CDC42, KRT18, HSF1, MYB, |
| | | | PRKAA2, ROCK2, TFP1, PRKG1, |
| | | | BMP2, CTNND1, CTH, CTSS, |
| | | | VAV2, NPY2R, IGFBP2, CD28, |
| | | | GSTA1, PPIA, APOH, S100A8, IL11, |
| | | | ALOX15, FBLN1, NR1H3, SCD, GIP, |
| | | | CHGB, PRKCB, SRD5A1,HSD11B2, |
| | | | CALCRL, GALNT2, ANGPTL4, |
| | | | KCNN4, PIK3C2A, HBEGF, |
| | | | CYP7A1, HLA-DRB5, BNIP3, |
| | | | GCKR, S100A12, PADI4, HSPA14, |
| | | | CXCR1, H19, KRTAP19-3, IDDM2, |
| | | | RAC2, YRY1, CLOCK, NGFR, DBH, |
| | | | CHRNA4, CACNA1C, PRKAG2, |
| | | | CHAT, PTGDS, NR1H2, TEK, |
| | | | VEGFB, MEF2C, MAPKAPK2, |
| | | | TNFRSF11A, HSPA9, CYSLTR1, |
| | | | MATIA, OPRL1, IMPA1, CLCN2, |
| | | | DLD, PSMA6, PSMB8, CHI3L1, |
| | | | ALDH1B1, PARP2,STAR, LBP, |
| | | | ABCC6, RGS2, EFNB2, GJB6, |
| | | | APOA2, AMPD1, DYSF, |
| | | | FDFT1,EMD2, CCR6, GJB3, IL1RL1, |
| | | | ENTPD1, BBS4, CELSR2, F11R, |
| | | | RAPGEF3, HYAL1, ZNF259, |
| | | | ATOX1, ATF6, KHK, SAT1, GGH, |
| | | | TIMP4, SLC4A4, PDE2A, PDE3B, |
| | | | FADS1, FADS2, TMSB4X, TXNIP, |
| | | | LIMS1, RHOB, LY96, FOXO1, |
| | | | PNPLA2,TRH, GJC1, S:C17A5, FTO, |
| | | | GJD2, PRSC1, CASP12, GPBAR1, |
| | | | PXK, IL33, TRIB1, PBX4, NUPR1, |
| | | | 15-SEP, CILP2, TERC, GGT2, |
| | | | MTCO1, UOX, AVP, ANGPLT3 |
| Cataract | eye | | CRYAA, CRYA1, CRYBB2, CRYB2, |
| | | | PITX3, BFSP2, CP49, CP47, CRYAA, |
| | | | CRYA1, PAX6, AN2, MGDA, |
| | | | CRYBA1, CRYB1, CRYGC, CRYG3, |
| | | | CCL, LIM2, MP19, CRYGD, CRYG4, |
| | | | BFSP2, CP49, CP47, HSF4, CTM, |
| | | | HSF4, CTM, MIP, AQP0, CRYAB, |
| | | | CRYA2, CTPP2, CRYBB1, CRYGD, |
| | | | CRYG4, CRYBB2, CRYB2, CRYGC, |
| | | | CRYG3, CCL, CRYAA, CRYA1, |
| | | | GJA8, CX50, CAE1, GJA3, CX46, |
| | | | CZP3, CAE3, CCM1, CAM, KRIT1 |
| CDKL-5 Deficiencies or | Brain, CNS | | CDKL5 |
| Mediated Diseases | | | |
| Charcot-Marie-Tooth (CMT) | Nervous system | Muscles | PMP22 (CMT1A and E), MPZ |
| disease (Types 1, 2, 3, 4,) | | (dystrophy) | (CMT1B), LITAF (CMT1C), EGR2 |
| | | | (CMT1D), NEFL (CMT1F), GJB1 |
| | | | (CMT1X), MFN2 (CMT2A), KIF1B |
| | | | (CMT2A2B), RAB7A (CMT2B), |
| | | | TRPV4 (CMT2C), GARS (CMT2D), |
| | | | NEFL (CMT2E), GAPD1 (CMT2K), |
| | | | HSPB8 (CMT2L), DYNC1H1, |
| | | | CMT2O), LRSAM1 (CMT2P), |
| | | | IGHMBP2 (CMT2S), MORC2 |
| | | | (CMT2Z), GDAP1 (CMT4A), |
| | | | MTMR2 or SBF2/MTMR13 |
| | | | (CMT4B), SH3TC2 (CMT4C), |
| | | | NDRG1 (CMT4D), PRX (CMT4F), |
| | | | FIG4 (CMT4J), NT-3 |
| Chédiak-Higashi Syndrome | Immune system | Skin, hair, eyes, | LYST |
| | | neurons | |
| Choroidermia | | | CHM, REP1, |
| Chorioretinal atrophy | eye | | PRDM13, RGR, TEAD1 |
| Chronic Granulomatous Disease | Immune system | | CYBA, CYBB, NCF1, NCF2, NCF4 |
| Chronic Mucocutaneous | Immune system | | AIRE, CARD9, CLEC7A IL12B, |
| Candidiasis | | | IL12B1, IL1F, IL17RA, IL17RC, |
| | | | RORC, STAT1, STAT3, TRAF31P2 |
| Cirrhosis | liver | | KRT18, KRT8, CIRH1A, NAIC, |
| | | | TEX292, KIAA1988 |
| Colon cancer (Familial | Gastrointestinal | | FAP: APC HNPCC: |
| adenomatous polyposis (FAP) | | | MSH2, MLH1, PMS2, SH6, PMS1 |
| and hereditary nonpolyposis | | | |
| colon cancer (HNPCC)) | | | |
| Combined Immunodeficiency | Immune System | | IL2RG, SCIDX1, SCIDX, IMD4); |
| | | | HIV-1 (CCL5, SCYA5, D17S136E, |
| | | | TCP228 |
| Cone(-rod) dystrophy | eye | | AIPL1, CRX, GUA1A, GUCY2D, |
| | | | PITPM3, PROM1, PRPH2, RIMS1, |
| | | | SEMA4A, ABCA4, ADAM9, ATF6, |
| | | | C21ORF2, C8ORF37, CACNA2D4, |
| | | | CDHR1, CERKL, CNGA3, CNGB3, |
| | | | CNNM4, CNAT2, IFT81, KCNV2, |
| | | | PDE6C, PDE6H, POC1B, RAX2, |
| | | | RDH5, RPGRIP1, TTLL5, RetCG1, |
| | | | GUCY2E |
| Congenital Stationary Night | eye | | CABP4, CACNA1F, CACNA2D4, |
| Blindness | | | GNAT1, CPR179, GRK1, GRM6, |
| | | | LRIT3, NYX, PDE6B, RDH5, RHO, |
| | | | RLBP1, RPE65, SAG, SLC24A1, |
| | | | TRPM1, |
| Congenital Fructose Intolerance | Metabolism | | ALDOB |
| Cori's Disease (Glycogen Storage | Various- | | AGL |
| Disease Type III) | wherever | | |
| | glycogen | | |
| | accumulates, | | |
| | particularly | | |
| | liver, heart, | | |
| | skeletal muscle | | |
| Corneal clouding and dystrophy | eye | | APOA1, TGFBI, CSD2, CDGG1, |
| | | | CSD, BIGH3, CDG2, TACSTD2, |
| | | | TROP2, M1S1, VSX1, RINX, PPCD, |
| | | | PPD, KTCN, COL8A2, FECD, |
| | | | PPCD2, PIP5K3, CFD |
| Cornea plana congenital | | | KERA, CNA2 |
| Cri du chat Syndrome, also | | | Deletions involving only band 5p15.2 |
| known as 5p syndrome and cat | | | to the entire short arm of chromosome |
| cry syndrome | | | 5, e.g. CTNND2, TERT, |
| Cystic Fibrosis (CF) | Lungs and | Pancreas, liver, | CTFR, ABCC7, CF, MRP7, SCNN1A, |
| | respiratory | digestive | those described in WO2015157070 |
| | system | system, | |
| | | reproductive | |
| | | system, | |
| | | exocrine, glands, | |
| Diabetic nephropathy | kidney | | Gremlin, 12/15-lipoxygenase, TIM44, |
| Dent Disease (Types 1 and 2) | Kidney | | Type 1: CLCN5, Type 2: ORCL |
| Dentatorubro-Pallidoluysian | CNS, brain, | | Atrophin-1 and Atn1 |
| Atrophy (DRPLA) (aka Haw | muscle | | |
| River and Naito-Oyanagi | | | |
| Disease) | | | |
| Down Syndrome | various | | Chromosome 21 trisomy |
| Drug Addiction | Brain | | Prkce; Drd2; Drd4; ABAT; |
| | | | GRIA2;Grm5; Grin1; Htr1b; Grin2a; |
| | | | Drd3; Pdyn; Gria1 |
| Duane syndrome (Types 1, 2, and | eye | | CHN1, indels on chromosomes 4 and 8 |
| 3, including subgroups A, B and | | | |
| C). Other names for this | | | |
| condition include: Duane's | | | |
| Retraction Syndrome (or DR | | | |
| syndrome), Eye Retraction | | | |
| Syndrome, Retraction Syndrome, | | | |
| Congenital retraction syndrome | | | |
| and Stilling-Turk-Duane | | | |
| Syndrome | | | |
| Duchenne muscular dystrophy | muscle | Cardiovascular, | DMD, BMD, dystrophin gene, intron |
| (DMD) | | respiratory | flanking exon 51 of DMD gene, exon |
| | | | 51 mutations in DMD gene, see also |
| | | | WO2013163628 and US Pat. Pub. |
| | | | 20130145487 |
| Edward's Syndrome | | | Complete or partial trisomy of |
| (Trisomy 18) | | | chromosome 18 |
| Ehlers-Danlos Syndrome (Types | Various | | COL5A1, COL5A2, COL1A1, |
| I-VI) | depending on | | COL3A1, TNXB, PLOD1, COL1A2, |
| | type: including | | FKBP14 and ADAMTS2 |
| | musculoskeletal, | | |
| | eye, vasculature, | | |
| | immune, and | | |
| | skin | | |
| Emery-Dreifuss muscular | muscle | | LMNA, LMN1, EMD2, FPLD, |
| dystrophy | | | CMD1A, HGPS, LGMD1B, LMNA, |
| | | | LMN1, EMD2, FPLD, CMD1A |
| Enhanced S-Cone Syndrome | eye | | NR2E3, NRL |
| Fabry's Disease | Various- | | GLA |
| | including skin, | | |
| | eyes, and | | |
| | gastrointestinal | | |
| | system, kidney, | | |
| | heart, brain, | | |
| | nervous system | | |
| Facioscapulohumeral muscular | muscles | | FSHMD1A, FSHD1A, FRG1, |
| dystrophy | | | |
| Factor H and Factor H-like 1 | blood | | HF1, CFH, HUS |
| Factor V Leiden thrombophilia | blood | | Factor V (F5) |
| and Factor V deficiency | | | |
| Factor V and Factor VII | blood | | MCFD2 |
| deficiency | | | |
| Factor VII deficiency | blood | | F7 |
| Factor X deficiency | blood | | F10 |
| Factor XI deficiency | blood | | F11 |
| Factor XII deficiency | blood | | F12, HAF |
| Factor XIIIA deficiency | blood | | F13A1, F13A |
| Factor XIIIB deficiency | blood | | F13B |
| Familial Hypercholestereolemia | Cardiovascular | | APOB, LDLR, PCSK9 |
| | system | | |
| Familial Mediterranean Fever | Various- | Heart, kidney, | MEFV |
| (FMF) also called recurrent | organs/tissues | brain/CNS, | |
| polyserositis or familial | with serous or | reproductive | |
| paroxysmal polyserositis | synovial | organs | |
| | membranes, | | |
| | skin, joints | | |
| Fanconi Anemia | Various-blood | | FANCA, FACA, FA1, FA, FAA, |
| | (anemia), | | FAAP95, FAAP90, FLJ34064, |
| | immune system, | | FANCC, FANCG, RAD51, BRCA1, |
| | cognitive, | | BRCA2, BRIP1, BACH1, FANCJ, |
| | kidneys, eyes, | | FANCB, FANCD1, FANCD2, |
| | musculoskeletal | | FANCD, FAD, FANCE, FACE, |
| | | | FANCF, FANCI, ERCC4, FANCL, |
| | | | FANCM, PALB2, RAD51C, SLX4, |
| | | | UBE2T, FANCB, XRCC9, PHF9, |
| | | | KIAA1596 |
| Fanconi Syndrome Types I | kidneys | | FRTS1, GATM |
| (Childhood onset) and II (Adult | | | |
| Onset) | | | |
| Fragile X syndrome and related | brain | | FMR1, FMR2; FXR1; FXR2; |
| disorders | | | mGLUR5 |
| Fragile XE Mental Retardation | Brain, nervous | | FMR1 |
| (aka Martin Bell syndrome) | system | | |
| Friedreich Ataxia (FRDA) | Brain, nervous | heart | FXN/X25 |
| | system | | |
| Fuchs endothelial corneal | Eye | | TCF4; COL8A2 |
| dystrophy | | | |
| Galactosemia | Carbohydrate | Various-where | GALT, GALK1, and GALE |
| | metabolism | galactose | |
| | disorder | accumulates- | |
| | | liver, brain, eyes | |
| Gastrointestinal Epithelial | | | CISH |
| Cancer, GI cancer | | | |
| Gaucher Disease (Types 1, 2, and | Fat metabolism | Various-liver, | GBA |
| 3, as well as other unusual forms | disorder | spleen, blood, | |
| that may not fit into these types) | | CNS, skeletal | |
| | | system | |
| Griscelli syndrome | | | |
| Glaucoma | eye | | MYOC, TIGR, GLC1A, JOAG, |
| | | | GPOA, OPTN, GLC1E, FIP2, HYPL, |
| | | | NRP, CYP1B1, GLC3A, OPA1, NTG, |
| | | | NPG, CYP1B1, GLC3A, those |
| | | | described in WO2015153780 |
| Glomerulo sclerosis | kidney | | CC chemokine ligand 2 |
| Glycogen Storage Diseases | Metabolism | | SLC2A2, GLUT2, G6PC, G6PT, |
| Types I-VI-See also Cori's | Diseases | | G6PT1, GAA, LAMP2, LAMPB, |
| Disease, Pompe's Disease, | | | AGL, GDE, GBE1, GYS2, PYGL, |
| McArdle's disease, Hers Disease, | | | PFKM, see also Cori's Disease, |
| and Von Gierke's disease | | | Pompe's Disease, McArdle's disease, |
| | | | Hers Disease, and Von Gierke's |
| | | | disease |
| RBC Glycolytic enzyme | blood | | any mutations in a gene for an enzyme |
| deficiency | | | in the glycolysis pathway including |
| | | | mutations in genes for hexokinases I |
| | | | and II, glucokinase, phosphoglucose |
| | | | isomerase, phosphofructokinase, |
| | | | aldolase Bm triosephosphate |
| | | | isomerease, glyceraldehydee-3- |
| | | | phosphate dehydrogenase, |
| | | | phosphoglycerokinase, |
| | | | phosphoglycerate mutase, enolase I, |
| | | | pyruvate kinase |
| Hartnup's disease | Malabsorption | Various-brain, | SLC6A19 |
| | disease | gastrointestinal, | |
| | | skin, | |
| Hearing Loss | ear | | NOX3, Hes5, BDNF, |
| Hemochromatosis (HH) | Iron absorption | Various- | HFE and H63D |
| | regulation | wherever iron | |
| | disease | accumulates, | |
| | | liver, heart, | |
| | | pancreas, joints, | |
| | | pituitary gland | |
| Hemophagocytic | blood | | PRF1, HPLH2, UNC13D, MUNC13- |
| lymphohistiocytosis disorders | | | 4, HPLH3, HLH3, FHL3 |
| Hemorrhagic disorders | blood | | PI, ATT, F5 |
| Hers disease (Glycogen storage | liver | muscle | PYGL |
| disease Type VI) | | | |
| Hereditary angioedema (HAE) | | | kalikrein B1 |
| Hereditary Hemorrhagic | Skin and | | ACVRL1, ENG and SMAD4 |
| Telangiectasia (Osler-Weber- | mucous | | |
| Rendu Syndrome) | membranes | | |
| Hereditary Spherocytosis | blood | | NK1, EPB42, SLC4A1, SPTA1, and |
| | | | SPTB |
| Hereditary Persistence of Fetal | blood | | HBG1, HBG2, BCL11A, promoter |
| Hemoglobin | | | region of HBG 1 and/or 2 (in the |
| | | | CCAAT box) |
| Hemophilia (hemophilia A | blood | | A: FVIII, F8C, HEMA |
| (Classic) a B (aka Christmas | | | B: FVIX, HEMB, FIX |
| disease) and C) | | | C: F9, F11 |
| Hepatic adenoma | liver | | TCF1, HNF1A, MODY3 |
| Hepatic failure, early onset, and | liver | | SCOD1, SCO1 |
| neurologic disorder | | | |
| Hepatic lipase deficiency | liver | | LIPC |
| Hepatoblastoma, cancer and | liver | | CTNNB1, PDGFRL, PDGRL, PRLTS, |
| carcinomas | | | AXIN1, AXIN, CTNNB1, TP53, P53, |
| | | | LFS1, IGF2R, MPRI, MET, CASP8, |
| | | | MCH5 |
| Hermansky-Pudlak syndrome | Skin, eyes, | | HPS1, HPS3, HPS4, HPS5, HPS6, |
| | blood, lung, | | HPS7, DTNBP1, BLOC1, BLOC1S2, |
| | kidneys, | | BLOC3 |
| | intestine | | |
| HIV susceptibility or infection | Immune system | | IL10, CSIF, CMKBR2, CCR2, |
| | | | CMKBR5, CCCKR5 (CCR5), those in |
| | | | WO2015148670A1 |
| Holoprosencephaly (HPE) | brain | | ACVRL1, ENG, SMAD4 |
| (Alobar, Semilobar, and Lobar) | | | |
| Homocystinuria | Metabolic | Various- | CBS, MTHFR, MTR, MTRR, and |
| | disease | connective | MMADHC |
| | | tissue, muscles, | |
| | | CNS, | |
| | | cardiovascular | |
| | | system | |
| HPV | | | HPV16 and HPV18 E6/E7 |
| HSV1, HSV2, and related | eve | | HSV1 genes (immediate early and late |
| keratitis | | | HSV-1 genes (UL1, 1.5, 5, 6, 8, 9, 12, |
| | | | 15, 16, 18, 19, 22, 23, 26, 26.5, 27, 28, |
| | | | 29, 30, 31, 32, 33, 34, 35, 36, 37, 38, |
| | | | 42, 48, 49.5, 50, 52, 54, S6, RL2, RS1, |
| | | | those described in WO2015153789, |
| | | | WO2015153791 |
| Hunter's Syndrome (aka | Lysosomal | Various-liver, | IDS |
| Mucopolysaccharidosis type II) | storage disease | spleen, eye, | |
| | | joint, heart, | |
| | | brain, skeletal | |
| Huntington's disease (HD) and | Brain, nervous | | HD, HTT, IT15, PRNP, PRIP, JPH3, |
| HD-like disorders | system | | JP3, HDL2, TBP, SCA17, PRKCE; |
| | | | IGF1; EP300; RCOR1; PRKCZ; |
| | | | HDAC4; and TGM2, and those |
| | | | described in WO2013130824, |
| | | | WO2015089354 |
| Hurler's Syndrome (aka | Lysosomal | Various-liver, | IDUA, α-L-iduronidase |
| mucopolysaccharidosis type I H, | storage disease | spleen, eye, | |
| MPS IH) | | joint, heart, | |
| | | brain, skeletal | |
| Hurler-Scheie syndrome (aka | Lysosomal | Various-liver, | IDUA, α-L-iduronidase |
| mucopolysaccharidosis type I H- | storage disease | spleen, eye, | |
| S, MPS I H-S) | | joint, heart, | |
| | | brain, skeletal | |
| hyaluronidase deficiency (aka | Soft and | | HYAL1 |
| MPS IX) | connective | | |
| | tissues | | |
| Hyper IgM syndrome | Immune system | | CD40L |
| Hyper-tension caused renal | kidney | | Mineral corticoid receptor |
| damage | | | |
| Immunodeficiencies | Immune System | | CD3E, CD3G, AICDA, AID, HIGM2, |
| | | | TNFRSF5, CD40, UNG, DGU, |
| | | | HIGM4, TNFSF5, CD40LG, HIGM1, |
| | | | IGM, FOXP3, IPEX, AIID, XPID, |
| | | | PIDX, TNFRSF14B, TACI |
| Inborn errors of metabolism: | Metabolism | Various organs | See also: Carbohydrate metabolism |
| including urea cycle disorders, | diseases, liver | and cells | disorders (e.g. galactosemia), Amino |
| organic acidemias), fatty acid | | | acid Metabolism disorders (e.g. |
| oxidation defects, amino | | | phenylketonuria), Fatty acid |
| acidopathies, carbohydrate | | | metabolism (e.g. MCAD deficiency), |
| disorders, mitochondrial | | | Urea Cycle disorders (e.g. |
| disorders | | | Citrullinemia), Organic acidemias (e.g. |
| | | | Maple Syrup Urine disease), |
| | | | Mitochondrial disorders (e.g. |
| | | | MELAS), peroxisomal disorders (e.g. |
| | | | Zellweger syndrome) |
| Inflammation | Various | | IL-10; IL-1 (IL-1a; IL-1b); IL-13; IL- |
| | | | 17 (IL-17a (CTLA8); IL- |
| | | | 17b; IL-17c; IL-17d; IL-17f); II-23; |
| | | | Cx3cr1; ptpn22; TNFa; |
| | | | NOD2/CARD15 for IBD; IL-6; IL-12 |
| | | | (IL-12a; IL-12b); |
| | | | CTLA4; Cx3cl1 |
| Inflammatory Bowel Diseases | Gastrointestinal | Joints, skin | NOD2, IRGM, LRRK2, ATG5, |
| (e.g. Ulcerative Colitis and | | | ATG16L1, IRGM, GATM, ECM1, |
| Chron's Disease) | | | CDH1, LAMB1, HNF4A, GNA12, |
| | | | IL10, CARD9/15. CCR6, IL2RA, |
| | | | MST1, TNFSF15, REL, STAT3, |
| | | | IL23R, IL12B, FUT2 |
| Interstitial renal fibrosis | kidney | | TGF-β type II receptor |
| Job's Syndrome (aka Hyper IgE | Immune System | | STAT3, DOCK8 |
| Syndrome) | | | |
| Juvenile Retinoschisis | eye | | RS1, XLRS1 |
| Kabuki Syndrome 1 | | | MLL4, KMT2D |
| Kennedy Disease (aka | Muscles, brain, | | SBMA/SMAX1/AR |
| Spinobulbar Muscular Atrophy) | nervous system | | |
| Klinefelter syndrome | Various- | | Extra X chromosome in males |
| | particularly | | |
| | those involved | | |
| | in development | | |
| | of male | | |
| | characteristics | | |
| Lafora Disease | Brain, CNS | | EMP2A and EMP2B |
| Leber Congenital Amaurosis | eye | | CRB1, RP12, CORD2, CRD, CRX, |
| | | | IMPDH1, OTX2, AIPL1, CABP4, |
| | | | CCT2, CEP290, CLUAP1, CRB1, |
| | | | CRX, DTHD1, GDF6, GUCY2D, |
| | | | IFT140, IQCB1, KCNJ13, LCA5, |
| | | | LRAT, NMNAT1, PRPH2, RD3, |
| | | | RDH12, RPE65, RP20, RPGRIP1, |
| | | | SPATA7, TULP1, LCA1, LCA4, |
| | | | GUC2D, CORD6, LCA3, |
| Lesch-Nyhan Syndrome | Metabolism | Various-joints, | HPRT1 |
| | disease | cognitive, brain, | |
| | | nervous system | |
| Leukocyte deficiencies and | blood | | ITGB2, CD18, LCAMB, LAD, |
| disorders | | | EIF2B1, EIF2BA, EIF2B2, EIF2B3, |
| | | | EIF2B5, LVWM, CACH, CLE, |
| | | | EIF2B4 |
| Leukemia | Blood | | TAL1, TCL5, SCL, TAL2, FLT3, |
| | | | NBS1, NBS, ZNFN1A1, IK1, LYF1, |
| | | | HOXD4, HOX4B, BCR, CML, PHL, |
| | | | ALL, ARNT, KRAS2, RASK2, |
| | | | GMPS, AF10, ARHGEF12, LARG, |
| | | | KIAA0382, CALM, CLTH, CEBPA, |
| | | | CEBP, CHIC2, BTL, FLT3, KIT, |
| | | | PBT, LPP, NPM1, NUP214, D9S46E, |
| | | | CAN, CAIN, RUNX1, CBFA2, |
| | | | AML1, WHSC1L1, NSD3, FLT3, |
| | | | AF1Q, NPM1, NUMA1, ZNF145, |
| | | | PLZF, PML, MYL, STAT5B, AF10, |
| | | | CALM, CLTH, ARL11, ARLTS1, |
| | | | P2RX7, P2X7, BCR, CML, PHL, |
| | | | ALL, GRAF, NF1, VRNF, WSS, |
| | | | NFNS, PTPN11, PTP2C, SHP2, NS1, |
| | | | BCL2, CCND1, PRAD1, BCL1, |
| | | | TCRA, GATA1, GF1, ERYF1, NFE1, |
| | | | ABL1, NQO1, DIA4, NMOR1, |
| | | | NUP214, D9S46E, CAN, CAIN |
| Limb-girdle muscular dystrophy | muscle | | LGMD |
| diseases | | | |
| Lowe syndrome | brain, eyes, | | OCRL |
| | kidneys | | |
| Lupus glomerulo-nephritis | kidney | | MAPK1 |
| Machado- | Brain, CNS, | | ATX3 |
| Joseph's Disease (also known as | muscle | | |
| Spinocerebellar ataxia Type 3) | | | |
| Macular degeneration | eye | | ABC4, CBC1, CHM1, APOE, |
| | | | C1QTNF5, C2, C3,CCL2, CCR2, |
| | | | CD36, CFB, CFH, CFHR1, CFHR3, |
| | | | CNGB3, CP, CRP, CST3, CTSD, |
| | | | CX3CR1, ELOVL4, ERCC6, FBLN5, |
| | | | FBLN6, FSCN2, HMCN1, HTRA1, |
| | | | IL6, IL8, PLEKHA1, PROM1, |
| | | | PRPH2, RPGR, SERPING1, TCOF1, |
| | | | TIMP3, TLR3 |
| Macular Dystrophy | eye | | BEST1, C1QTNF5, CTNNA1, |
| | | | EFEMP1, ELOVL4, FSCN2, |
| | | | GUCA1B, HMCN1, IMPG1, OTX2, |
| | | | PRDM13, PROM1, PRPH2, RP1L1, |
| | | | TIMP3, ABCA4, CFH, DRAM2, |
| | | | IMG1, MFSD8, ADMD, STGD2, |
| | | | STGD3, RDS, RP7, PRPH, AVMD, |
| | | | AOFMD, VMD2 |
| Malattia Leventinesse | eye | | EFEMP1, FBLN3 |
| Maple Syrup Urine Disease | Metabolism | | BCKDHA, BCKDHB, and DBT |
| | disease | | |
| Marfan syndrome | Connective | Musculoskeletal | FBN1 |
| | tissue | | |
| Maroteaux-Lamy Syndrome (aka | Musculoskeletal | Liver, spleen | ARSB |
| MPS VI) | system, nervous | | |
| | system | | |
| McArdle's Disease (Glycogen | Glycogen | muscle | PYGM |
| Storage Disease Type V) | storage disease | | |
| Medullary cystic kidney disease | kidney | | UMOD, HNFJ, FJHN, MCKD2, |
| | | | ADMCKD2 |
| Metachromatic leukodystrophy | Lysosomal | Nervous system | ARSA |
| | storage disease | | |
| Methylmalonic acidemia (MMA) | Metabolism | | MMAA, MMAB, MUT, MMACHC, |
| | disease | | MMADHC, LMBRD1 |
| Morquio Syndrome (aka MPS IV | Connective | heart | GALNS |
| A and B) | tissue, skin, | | |
| | bone, eyes | | |
| Mucopolysaccharidosis diseases | Lysosomal | | See also Hurler/Scheie syndrome, |
| (Types I H/S, I H, II, III A B and | storage disease- | | Hurler disease, Sanfillipo syndrome, |
| C, IS, IVA and B, IX, VII, and | affects various | | Scheie syndrome, Morquio syndrome, |
| VI) | organs/tissues | | hyaluronidase deficiency, Sly |
| | | | syndrome, and Maroteaux-Lamy |
| | | | syndrome |
| Muscular Atrophy | muscle | | VAPB, VAPC, ALS8, SMN1, SMA1, |
| | | | SMA2, SMA3, SMA4, BSCL2, |
| | | | SPG17, GARS, SMAD1, CMT2D, |
| | | | HEXB, IGHMBP2, SMUBP2, |
| | | | CATF1, SMARD1 |
| Muscular dystrophy | muscle | | FKRP, MDC1C, LGMD2I, LAMA2, |
| | | | LAMM, LARGE, KIAA0609, |
| | | | MDC1D, FCMD, TTID, MYOT, |
| | | | CAPN3, CANP3, DYSF, LGMD2B, |
| | | | SGCG, LGMD2C, DMDA1, SCG3, |
| | | | SGCA, ADL, DAG2, LGMD2D, |
| | | | DMDA2, SGCB, LGMD2E, SGCD, |
| | | | SGD, LGMD2F, CMDIL, TCAP, |
| | | | LGMD2G, CMDIN, TRIM32, HT2A, |
| | | | LGMD2H, FKRP, MDC1C, LGMD2I, |
| | | | TTN, CMD1G, TMD, LGMD2J, |
| | | | POMT1, CAV3, LGMD1C, SEPN1, |
| | | | SELN, RSMD1, PLEC1, PLTN, EBS1 |
| Myotonic dystrophy (Type 1 and | Muscles | Eyes, heart, | CNBP (Type 2) and DMPK (Type 1) |
| Type 2) | | endocrine | |
| Neoplasia | | | PTEN; ATM; ATR; EGFR; ERBB2; |
| | | | ERBB3; ERBB4; |
| | | | Notch1; Notch2; Notch3; Notch4; |
| | | | AKT; AKT2; AKT3; HIF; |
| | | | HIF1a; HIF3a; Met; HRG; Bcl2; |
| | | | PPAR alpha; PPAR |
| | | | gamma; WT1 (Wilms Tumor); FGF |
| | | | Receptor Family |
| | | | members (5 members: 1, 2, 3, 4, 5); |
| | | | CDKN2a; APC; RB |
| | | | (retinoblastoma); MEN1; VHL; |
| | | | BRCA1; BRCA2; AR |
| | | | (Androgen Receptor); TSG101; IGF; |
| | | | IGF Receptor; Igf1 (4 |
| | | | variants); Igf2 (3 variants); Igf 1 |
| | | | Receptor; Igf 2 Receptor; |
| | | | Bax; Bcl2; caspases family (9 |
| | | | members: |
| | | | 1, 2, 3, 4, 6, 7, 8, 9, 12); Kras; Apc |
| Neurofibromatosis (NF) (NF1, | brain, spinal | | NF1, NF2 |
| formerly Recklinghausen's NF, | cord, nerves, | | |
| and NF2) | and skin | | |
| Niemann-Pick Lipidosis (Types | Lysosomal | Various-where | Types A and B: SMPD1; Type C: |
| A, B, and C) | Storage Disease | sphingomyelin | NPC1 or NPC2 |
| | | accumulates, | |
| | | particularly | |
| | | spleen, liver, | |
| | | blood, CNS | |
| Noonan Syndrome | Various- | | PTPN11, SOS1, RAF1 and KRAS |
| | musculoskeletal, | | |
| | heart, eyes, | | |
| | reproductive | | |
| | organs, blood | | |
| Norrie Disease or X-linked | eye | | NDP |
| Familial Exudative | | | |
| Vitreoretinopathy | | | |
| North Carolina Macular | eye | | MCDR1 |
| Dystrophy | | | |
| Osteogenesis imperfecta (OI) | bones, | | COL1A1, COL1A2, CRTAP, P3H |
| (Types I, II, III, IV, V, VI, VII) | musculoskeletal | | |
| Osteopetrosis | bones | | LRP5, BMND1, LRP7, LR3, OPPG, |
| | | | VBCH2, CLCN7, CLC7, OPTA2, |
| | | | OSTM1, GL, TCIRG1, TIRC7, |
| | | | OC116, OPTB1 |
| Patau's Syndrome | Brain, heart, | | Additional copy of chromosome 13 |
| (Trisomy 13) | skeletal system | | |
| Parkinson's disease (PD) | Brain, nervous | | SNCA (PARK1), UCHL1 (PARK 5), |
| | system | | and LRRK2 (PARK8), (PARK3), |
| | | | PARK2, PARK4, PARK7 (PARK7), |
| | | | PINK1 (PARK6); x-Synuclein, DJ-1, |
| | | | Parkin, NR4A2, NURR1, NOT, |
| | | | TINUR, SNCAIP, TBP, SCA17, |
| | | | NCAP, PRKN, PDJ, DBH, NDUFV2 |
| Pattern Dystrophy of the RPE | eye | | RDS/peripherin |
| Phenylketonuria (PKU) | Metabolism | Various due to | PAH, PKU1, QDPR, DHPR, PTS |
| | disorder | build-up of | |
| | | phenylalanine, | |
| | | phenyl ketones | |
| | | in tissues and | |
| | | CNS | |
| Polycystic kidney and hepatic | Kidney, liver | | FCYT, PKHD1, ARPKD, PKD1, |
| disease | | | PKD2, PKD4, PKDTS, PRKCSH, |
| | | | G19P1, PCLD, SEC63 |
| Pompe's Disease | Glycogen | Various-heart, | GAA |
| | storage disease | liver, spleen | |
| Porphyria (actually refers to a | Various- | | ALAD, ALAS2, CPOX, FECH, |
| group of different diseases all | wherever heme | | HMBS, PPOX, UROD, or UROS |
| having a specific heme | precursors | | |
| production process abnormality) | accumulate | | |
| posterior polymorphous corneal | eyes | | TCF4; COL8A2 |
| dystrophy | | | |
| Primary Hyperoxaluria (e.g. type | Various-eyes, | | LDHA (lactate dehydrogenase A) and |
| 1 | heart, kidneys, | | hydroxyacid oxidase 1 (HAO1) |
| | skeletal system | | |
| Primary Open Angle Glaucoma | eyes | | MYOC |
| (POAG) | | | |
| Primary sclerosing cholangitis | Liver, | | TCF4; COL8A2 |
| | gallbladder | | |
| Progeria (also called Hutchinson- | All | | LMNA |
| Gilford progeria syndrome) | | | |
| Prader-Willi Syndrome | Musculoskeletal | | Deletion of region of short arm of |
| | system, brain, | | chromosome 15, including UBE3A |
| | reproductive | | |
| | and endocrine | | |
| | system | | |
| Prostate Cancer | prostate | | HOXB13, MSMB, GPRC6A, TP53 |
| Pyruvate Dehydrogenase | Brain, nervous | | PDHA1 |
| Deficiency | system | | |
| Kidney/Renal carcinoma | kidney | | RLIP76, VEGF |
| Rett Syndrome | Brain | | MECP2, RTT, PPMX, MRX16, |
| | | | MRX79, CDKL5, STK9, MECP2, |
| | | | RTT, PPMX, MRX16, MRX79, x- |
| | | | Synuclein, DJ-1 |
| Retinitis pigmentosa (RP) | eye | | ADIPOR1, ABCA4, AGBL5, |
| | | | ARHGEF18, ARL2BP, ARL3, ARL6, |
| | | | BEST1, BBS1, BBS2, C2ORF71, |
| | | | C8ORF37, CA4, CERKL, CLRN1, |
| | | | CNGA1, CMGB1, CRB1, CRX, |
| | | | CYP4V2, DHDDS, DHX38, EMC1, |
| | | | EYS, FAM161A, FSCN2, GPR125, |
| | | | GUCA1B, HK1, HPRPF3, HGSNAT, |
| | | | IDH3B, IMPDH1, IMPG2, IFT140, |
| | | | IFT172, KLHL7, KIAA1549, KIZ, |
| | | | LRAT, MAK, MERTK, MVK, NEK2, |
| | | | NUROD1, NR2E3, NRL, OFD1, |
| | | | PDE6A, PDE6B, PDE6G, POMGNT1, |
| | | | PRCD, PROM1, PRPF3, PRPF4, |
| | | | PRPF6, PRPF8, PRPF31, PRPH2, |
| | | | RPB3, RDH12, REEP6, RP39, RGR, |
| | | | RHO, RLBP1, ROM1, RP1, RP1L1, |
| | | | RPY, RP2, RP9, RPE65, RPGR, |
| | | | SAMD11, SAG, SEMA4A, SLC7A14, |
| | | | SNRNP200, SPP2, SPATA7, TRNT1, |
| | | | TOPORS, TTC8, TULP1, USH2A, |
| | | | ZFN408, ZNF513, see also |
| | | | 20120204282 |
| Scheie syndrome (also known as | Various-liver, | | IDUA, α-L-iduronidase |
| mucopolysaccharidosis type I | spleen, eye, | | |
| S(MPS I-S)) | joint, heart, | | |
| | brain, skeletal | | |
| Schizophrenia | Brain | | Neuregulin1 (Nrg1); Erb4 (receptor for |
| | | | Neuregulin); |
| | | | Complexin1 (Cplx1); Tph1 |
| | | | Tryptophan hydroxylase; Tph2 |
| | | | Tryptophan hydroxylase 2; Neurexin |
| | | | 1; GSK3; GSK3a; |
| | | | GSK3b; 5-HTT (Slc6a4); COMT; |
| | | | DRD (Drdla); SLC6A3; DAOA; |
| | | | DTNBP1; Dao (Dao1); TCF4; |
| | | | COL8A2 |
| Secretase Related Disorders | Various | | APH-1 (alpha and beta); PSEN1; |
| | | | NCSTN; PEN-2; Nos1, Parp1, Nat1, |
| | | | Nat2, CTSB, APP, APH1B, PSEN2, |
| | | | PSENEN, BACE1, ITM2B, CTSD, |
| | | | NOTCH1, TNF, INS, DYT10, |
| | | | ADAM17, APOE, ACE, STN, TP53, |
| | | | IL6, NGFR, IL1B, ACHE, CTNNB1, |
| | | | IGF1, IFNG, NRG1, CASP3, MAPK1, |
| | | | CDH1, APBB1, HMGCR, CREB1, |
| | | | PTGS2, HES1, CAT, TGFB1, ENO2, |
| | | | ERBB4, TRAPPC10, MAOB, NGF, |
| | | | MMP12, JAG1, CD40LG, PPARG, |
| | | | FGF2, LRP1, NOTCH4, MAPK8, |
| | | | PREP, NOTCH3, PRNP, CTSG, EGF, |
| | | | REN, CD44, SELP, GHR, ADCYAP1, |
| | | | INSR, GFAP, MMP3, MAPK10, SP1, |
| | | | MYC, CTSE, PPARA, JUN, TIMP1, |
| | | | IL5, IL1A, MMP9, HTR4, HSPG2, |
| | | | KRAS, CYCS, SMG1, IL1R1, |
| | | | PROK1, MAPK3, NTRK1, IL13, |
| | | | MME, TKT, CXCR2, CHRM1, |
| | | | ATXN1,PAWR, NOTCJ2, M6PR, |
| | | | CYP46A1, CSNK1D, MAPK14, |
| | | | PRG2, PRKCA, L1 CAM, CD40, |
| | | | NR112, JAG2, CTNND1, CMA1, |
| | | | SORT1, DLK1, THEM4, JUP, CD46, |
| | | | CCL11, CAV3, RNASE3, HSPA8, |
| | | | CASP9, CYP3A4, CCR3, TFAP2A, |
| | | | SCP2, CDK4, JOF1A, TCF7L2, |
| | | | B3GALTL, MDM2, RELA, CASP7, |
| | | | IDE, FANP4, CASK, ADCYAPIR1, |
| | | | ATF4, PDGFA, C21ORF33, SCG5, |
| | | | RMF123, NKFB1, ERBB2, CAV1, |
| | | | MMP7, TGFA, RXRA, STX1A, |
| | | | PSMC4, P2RY2, TNFRSF21, DLG1, |
| | | | NUMBL, SPN, PLSCR1, UBQLN2, |
| | | | UBQLN1, PCSK7, SPON1, SILV, |
| | | | QPCT, HESS, GCC1 |
| Selective IgA Deficiency | Immune system | | Type 1: MSH5; Type 2: TNFRSF13B |
| Severe Combined | Immune system | | JAK3, JAKL, DCLREIC, ARTEMIS, |
| Immunodeficiency (SCID) and | | | SCIDA, RAG1, RAG2, ADA, PTPRC, |
| SCID-X1, and ADA-SCID | | | CD45, LCA, IL7R, CD3D, T3D, |
| | | | IL2RG, SCIDX1, SCIDX, IMD4, |
| | | | those identified in U.S. Pat. App. Pub. |
| | | | 20110225664, 20110091441, |
| | | | 20100229252, 20090271881 and |
| | | | 20090222937; |
| Sickle cell disease | blood | | HBB, BCL11A, BCL11Ae, cis- |
| | | | regulatory elements of the B-globin |
| | | | locus, HBG 1/2 promoter, HBG distal |
| | | | CCAAT box region between-92 and- |
| | | | 130 of the HBG Transcription Start |
| | | | Site, those described in |
| | | | WO2015148863, WO 2013/126794, |
| | | | U.S. Pat. Pub. 20110182867 |
| Sly Syndrome (aka MPS VII) | | | GUSB |
| Spinocerebellar Ataxias (SCA | | | ATXN1, ATXN2, ATX3 |
| types 1, 2, 3, 6, 7, 8, 12 and 17) | | | |
| Sorsby Fundus Dystrophy | eve | | TIMP3 |
| Stargardt disease | eye | | ABCR, ELOVL4, ABCA4, PROM1 |
| Tay-Sachs Disease | Lysosomal | Various-CNS, | HEX-A |
| | Storage disease | brain, eye | |
| Thalassemia (Alpha, Beta, Delta) | blood | | HBA1, HBA2 (Alpha), HBB (Beta), |
| | | | HBB and HBD (delta), LCRB, |
| | | | BCL11A, BCL11Ae, cis-regulatory |
| | | | elements of the B-globin locus, HBG |
| | | | 1/2 promoter, those described in |
| | | | WO2015148860, U.S. Pat. Pub. |
| | | | 20110182867, 2015/148860 |
| Thymic Aplasia (DiGeorge | Immune system, | | deletion of 30 to 40 genes in the |
| Syndrome;22q11.2 deletion | thy mus | | middle of chromosome 22 at |
| syndrome) | | | a location known as 22q11.2, including |
| | | | TBX1, DGCR8 |
| Transthyretin amyloidosis | liver | | TTR (transthyretin) |
| (ATTR) | | | |
| trimethylaminuria | Metabolism | | FMO3 |
| | disease | | |
| Trinucleotide Repeat Disorders | Various | | HTT; SBMA/SMAX1/AR; |
| (generally) | | | FXN/X25 ATX3; |
| | | | ATXN1; ATXN2; |
| | | | DMPK; Atrophin-1 and Atn1 |
| | | | (DRPLA Dx); CBP (Creb-BP-global |
| | | | instability); VLDLR; Atxn7; Atxn10; |
| | | | FEN1, TNRC6A, PABPN1, JPH3, |
| | | | MED15, ATXN1, ATXN3, TBP, |
| | | | CACNA1A, ATXN80S, PPP2R2B, |
| | | | ATXN7, TNRC6B, TNRC6C, CELF3, |
| | | | MAB21L1, MSH2, TMEM185A, |
| | | | SIX5, CNPY3, RAXE, GNB2, RPL14, |
| | | | ATXN8, ISR, TTR, EP400, GIGYF2, |
| | | | OGG1, STC1, CNDP1, C10ORF2, |
| | | | MAML3, DKC1, PAXIP1, CASK, |
| | | | MAPT, SP1, POLG, AFF2, THBS1, |
| | | | TP53, ESR1, CGGBP1, ABT1, KLK3, |
| | | | PRNP, JUN, KCNN3, BAX, FRAXA, |
| | | | KBTBD10, MBNL1, RAD51, |
| | | | NCOA3, ERDA1, TSC1, COMP, |
| | | | GGLC, RRAD, MSH3, DRD2, CD44, |
| | | | CTCF, CCND1, CLSPN, MEF2A, |
| | | | PTPRU, GAPDH, TRIM22, WT1, |
| | | | AHR, GPX1, TPMT, NDP, ARX, |
| | | | TYR, EGR1, UNG, NUMBL, FABP2, |
| | | | EN2, CRYGC, SRP14, CRYGB, |
| | | | PDCD1, HOXA1, ATXN2L, PMS2, |
| | | | GLA, CBL, FTH1, IL12RB2, OTX2, |
| | | | HOXA5, POLG2, DLX2, AHRR, |
| | | | MANF, RMEM158, see also |
| | | | 20110016540 |
| Turner's Syndrome (XO) | Various- | | Monosomy X |
| | reproductive | | |
| | organs, and sex | | |
| | characteristics, | | |
| | vasculature | | |
| Tuberous Sclerosis | CNS, heart, | | TSC1, TSC2 |
| | kidneys | | |
| Usher syndrome (Types I, II, and | Ears, eyes | | ABHD12, CDH23, CIB2, CLRN1, |
| III) | | | DFNB31, GPR98, HARS, MYO7A, |
| | | | PCDH15, USH1C, USH1G, USH2A, |
| | | | USH11A, those described in |
| | | | WO2015134812A1 |
| Velocardiofacial syndrome (aka | Various- | | Many genes are deleted, COM, TBX1, |
| 22q11.2 deletion syndrome, | skeletal, heart, | | and other are associated with |
| DiGeorge syndrome, conotruncal | kidney, immune | | symptoms |
| anomaly face syndrome (CTAF), | system, brain | | |
| autosomal dominant Opitz G/BB | | | |
| syndrome or Cayler cardiofacial | | | |
| syndrome) | | | |
| Von Gierke's Disease (Glycogen | Glycogen | Various-liver, | G6PC and SLC37A4 |
| Storage Disease type I) | Storage disease | kidney | |
| Von Hippel-Lindau Syndrome | Various-cell | CNS, Kidney, | VHL |
| | growth | Eye, visceral | |
| | regulation | organs | |
| | disorder | | |
| Von Willebrand Disease (Types | blood | | VWF |
| I, II and III) | | | |
| Wilson Disease | Various- | Liver, brains, | ATP7B |
| | Copper Storage | eyes, other | |
| | Disease | tissues where | |
| | | copper builds up | |
| Wiskott-Aldrich Syndrome | Immune System | | WAS |
| Xeroderma Pigmentosum | Skin | Nervous system | POLH |
| XXX Syndrome | Endocrine, brain | | X chromosome trisomy |

[0959] In some embodiments, the CRISPR-Cas systems or components thereof can be used treat or prevent a disease in a subject by modifying one or more genes associated with one or more cellular functions, such as any one or more of those in Table 12. In some embodiments, the disease is a genetic disease or disorder. In some of embodiments, the CRISPR-Cas system or component thereof can modify one or more genes or polynucleotides associated with one or more genetic diseases such as any set forth in Table 12.

TABLE 12
Exemplary Genes controlling Cellular Functions

| CELLULAR FUNCTION | GENES |
|---|---|
| PI3K/AKT Signaling | PRKCE; ITGAM; ITGA5; IRAK1; PRKAA2; EIF2AK2; |
| | PTEN; EIF4E; PRKCZ; GRK6; MAPK1; TSC1; PLK1; |
| | AKT2; IKBKB; PIK3CA; CDK8; CDKN1B; NFKB2; BCL2; |
| | PIK3CB; PPP2R1A; MAPK8; BCL2L1; MAPK3; TSC2; |
| | ITGA1; KRAS; EIF4EBP1; RELA; PRKCD; NOS3; |
| | PRKAA1; MAPK9; CDK2; PPP2CA; PIM1; ITGB7; |
| | YWHAZ; ILK; TP53; RAF1; IKBKG; RELB; DYRK1A; |
| | CDKN1A; ITGB1; MAP2K2; JAK1; AKT1; JAK2; PIK3R1; |
| | CHUK; PDPK1; PPP2R5C; CTNNB1; MAP2K1; NFKB1; |
| | PAK3; ITGB3; CCND1; GSK3A; FRAP1; SFN; ITGA2; |
| | TTK; CSNK1A1; BRAF; GSK3B; AKT3; FOXO1; SGK; |
| | HSP90AA1; RPS6KB1 |
| ERK/MAPK Signaling | PRKCE; ITGAM; ITGA5; HSPB1; IRAK1; PRKAA2; |
| | EIF2AK2; RAC1; RAP1A; TLN1; EIF4E; ELK1; GRK6; |
| | MAPK1; RAC2; PLK1; AKT2; PIK3CA; CDK8; CREB1; |
| | PRKCI; PTK2; FOS; RPS6KA4; PIK3CB; PPP2R1A; |
| | PIK3C3; MAPK8; MAPK3; ITGA1; ETS1; KRAS; MYCN; |
| | EIF4EBP1; PPARG; PRKCD; PRKAA1; MAPK9; SRC; |
| | CDK2; PPP2CA; PIM1; PIK3C2A; ITGB7; YWHAZ; |
| | PPP1CC; KSR1; PXN; RAF1; FYN; DYRK1A; ITGB1; |
| | MAP2K2; PAK4; PIK3R1; STAT3; PPP2R5C; MAP2K1; |
| | PAK3; ITGB3; ESR1; ITGA2; MYC; TTK; CSNK1A1; |
| | CRKL; BRAF; ATF4; PRKCA; SRF; STAT1; SGK |
| Glucocorticoid Receptor | RAC1; TAF4B; EP300; SMAD2; TRAF6; PCAF; ELK1; |
| Signaling | MAPK1; SMAD3; AKT2; IKBKB; NCOR2; UBE2I; |
| | PIK3CA; CREB1; FOS; HSPA5; NFKB2; BCL2; |
| | MAP3K14; STAT5B; PIK3CB; PIK3C3; MAPK8; BCL2L1; |
| | MAPK3; TSC22D3; MAPK10; NRIP1; KRAS; MAPK13; |
| | RELA; STAT5A; MAPK9; NOS2A; PBX1; NR3C1; |
| | PIK3C2A; CDKN1C; TRAF2; SERPINE1; NCOA3; |
| | MAPK14; TNF; RAF1; IKBKG; MAP3K7; CREBBP; |
| | CDKN1A; MAP2K2; JAK1; IL8; NCOA2; AKT1; JAK2; |
| | PIK3R1; CHUK; STAT3; MAP2K1; NFKB1; TGFBR1; |
| | ESR1; SMAD4; CEBPB; JUN; AR; AKT3; CCL2; MMP1; |
| | STAT1; IL6; HSP90AA1 |
| Axonal Guidance Signaling | PRKCE; ITGAM; ROCK1; ITGA5; CXCR4; ADAM12; |
| | IGF1; RAC1; RAP1A; EIF4E; PRKCZ; NRP1; NTRK2; |
| | ARHGEF7; SMO; ROCK2; MAPK1; PGF; RAC2; |
| | PTPN11; GNAS; AKT2; PIK3CA; ERBB2; PRKCI; PTK2; |
| | CFL1; GNAQ; PIK3CB; CXCL12; PIK3C3; WNT11; |
| | PRKD1; GNB2L1; ABL1; MAPK3; ITGA1; KRAS; RHOA; |
| | PRKCD; PIK3C2A; ITGB7; GLI2; PXN; VASP; RAF1; |
| | FYN; ITGB1; MAP2K2; PAK4; ADAM17; AKT1; PIK3R1; |
| | GLI1; WNT5A; ADAM10; MAP2K1; PAK3; ITGB3; |
| | CDC42; VEGFA; ITGA2; EPHA8; CRKL; RND1; GSK3B; |
| | AKT3; PRKCA |
| Ephrin Receptor Signaling | PRKCE; ITGAM; ROCK1; ITGA5; CXCR4; IRAK1; |
| Actin Cytoskeleton | PRKAA2; EIF2AK2; RAC1; RAP1A; GRK6; ROCK2; |
| Signaling | MAPK1; PGF; RAC2; PTPN11; GNAS; PLK1; AKT2; |
| | DOK1; CDK8; CREB1; PTK2; CFL1; GNAQ; MAP3K14; |
| | CXCL12; MAPK8; GNB2L1; ABL1; MAPK3; ITGA1; |
| | KRAS; RHOA; PRKCD; PRKAA1; MAPK9; SRC; CDK2; |
| | PIM1; ITGB7; PXN; RAF1; FYN; DYRK1A; ITGB1; |
| | MAP2K2; PAK4; AKT1; JAK2; STAT3; ADAM10; |
| | MAP2K1; PAK3; ITGB3; CDC42; VEGFA; ITGA2; |
| | EPHA8; TTK; CSNK1A1; CRKL; BRAF; PTPN13; ATF4; |
| | AKT3; SGK |
| | ACTN4; PRKCE; ITGAM; ROCK1; ITGA5; IRAK1; |
| | PRKAA2; EIF2AK2; RAC1; INS; ARHGEF7; GRK6; |
| | ROCK2; MAPK1; RAC2; PLK1; AKT2; PIK3CA; CDK8; |
| | PTK2; CFL1; PIK3CB; MYH9; DIAPH1; PIK3C3; MAPK8; |
| | F2R; MAPK3; SLC9A1; ITGA1; KRAS; RHOA; PRKCD; |
| | PRKAA1; MAPK9; CDK2; PIM1; PIK3C2A; ITGB7; |
| | PPP1CC; PXN; VIL2; RAF1; GSN; DYRK1A; ITGB1; |
| | MAP2K2; PAK4; PIP5K1A; PIK3R1; MAP2K1; PAK3; |
| | ITGB3; CDC42; APC; ITGA2; TTK; CSNK1A1; CRKL; |
| | BRAF; VAV3; SGK |
| Huntington's Disease | PRKCE; IGF1; EP300; RCOR1; PRKCZ; HDAC4; TGM2; |
| Signaling | MAPK1; CAPNS1; AKT2; EGFR; NCOR2; SP1; CAPN2; |
| | PIK3CA; HDAC5; CREB1; PRKCI; HSPA5; REST; |
| | GNAQ; PIK3CB; PIK3C3; MAPK8; IGF1R; PRKD1; |
| | GNB2L1; BCL2L1; CAPN1; MAPK3; CASP8; HDAC2; |
| | HDACTA; PRKCD; HDAC11; MAPK9; HDAC9; PIK3C2A; |
| | HDAC3; TP53; CASP9; CREBBP; AKT1; PIK3R1; |
| | PDPK1; CASP1; APAF1; FRAP1; CASP2; JUN; BAX; |
| | ATF4; AKT3; PRKCA; CLTC; SGK; HDAC6; CASP3 |
| Apoptosis Signaling | PRKCE; ROCK1; BID; IRAK1; PRKAA2; EIF2AK2; BAK1; |
| | BIRC4; GRK6; MAPK1; CAPNS1; PLK1; AKT2; IKBKB; |
| | CAPN2; CDK8; FAS; NFKB2; BCL2; MAP3K14; MAPK8; |
| | BCL2L1; CAPN1; MAPK3; CASP8; KRAS; RELA; |
| | PRKCD; PRKAA1; MAPK9; CDK2; PIM1; TP53; TNF; |
| | RAF1; IKBKG; RELB; CASP9; DYRK1A; MAP2K2; |
| | CHUK; APAF1; MAP2K1; NFKB1; PAK3; LMNA; CASP2; |
| | BIRC2; TTK; CSNK1A1; BRAF; BAX; PRKCA; SGK; |
| | CASP3; BIRC3; PARP1 |
| B Cell Receptor Signaling | RAC1; PTEN; LYN; ELK1; MAPK1; RAC2; PTPN11; |
| | AKT2; IKBKB; PIK3CA; CREB1; SYK; NFKB2; CAMK2A; |
| | MAP3K14; PIK3CB; PIK3C3; MAPK8; BCL2L1; ABL1; |
| | MAPK3; ETS1; KRAS; MAPK13; RELA; PTPN6; MAPK9; |
| | EGR1; PIK3C2A; BTK; MAPK14; RAF1; IKBKG; RELB; |
| | MAP3K7; MAP2K2; AKT1; PIK3R1; CHUK; MAP2K1; |
| | NFKB1; CDC42; GSK3A; FRAP1; BCL6; BCL10; JUN; |
| | GSK3B; ATF4; AKT3; VAV3; RPS6KB1 |
| Leukocyte Extravasation | ACTN4; CD44; PRKCE; ITGAM; ROCK1; CXCR4; CYBA; |
| Signaling | RAC1; RAP1A; PRKCZ; ROCK2; RAC2; PTPN11; |
| | MMP14; PIK3CA; PRKCI; PTK2; PIK3CB; CXCL12; |
| | PIK3C3; MAPK8; PRKD1; ABL1; MAPK10; CYBB; |
| | MAPK13; RHOA; PRKCD; MAPK9; SRC; PIK3C2A; BTK; |
| | MAPK14; NOX1; PXN; VIL2; VASP; ITGB1; MAP2K2; |
| | CTNND1; PIK3R1; CTNNB1; CLDN1; CDC42; F11R; ITK; |
| | CRKL; VAV3; CTTN; PRKCA; MMP1; MMP9 |
| Integrin Signaling | ACTN4; ITGAM; ROCK1; ITGA5; RAC1; PTEN; RAP1A; |
| | TLN1; ARHGEF7; MAPK1; RAC2; CAPNS1; AKT2; |
| | CAPN2; PIK3CA; PTK2; PIK3CB; PIK3C3; MAPK8; |
| | CAV1; CAPN1; ABL1; MAPK3; ITGA1; KRAS; RHOA; |
| | SRC; PIK3C2A; ITGB7; PPP1CC; ILK; PXN; VASP; |
| | RAF1; FYN; ITGB1; MAP2K2; PAK4; AKT1; PIK3R1; |
| | TNK2; MAP2K1; PAK3; ITGB3; CDC42; RND3; ITGA2; |
| | CRKL; BRAF; GSK3B; AKT3 |
| Acute Phase Response | IRAK1; SOD2; MYD88; TRAF6; ELK1; MAPK1; PTPN11; |
| Signaling | AKT2; IKBKB; PIK3CA; FOS; NFKB2; MAP3K14; |
| | PIK3CB; MAPK8; RIPK1; MAPK3; IL6ST; KRAS; |
| | MAPK13; IL6R; RELA; SOCS1; MAPK9; FTL; NR3C1; |
| | TRAF2; SERPINE1; MAPK14; TNF; RAF1; PDK1; |
| | IKBKG; RELB; MAP3K7; MAP2K2; AKT1; JAK2; PIK3R1; |
| | CHUK; STAT3; MAP2K1; NFKB1; FRAP1; CEBPB; JUN; |
| | AKT3; IL1R1; IL6 |
| PTEN Signaling | ITGAM; ITGA5; RAC1; PTEN; PRKCZ; BCL2L11; |
| | MAPK1; RAC2; AKT2; EGFR; IKBKB; CBL; PIK3CA; |
| | CDKN1B; PTK2; NFKB2; BCL2; PIK3CB; BCL2L1; |
| | MAPK3; ITGA1; KRAS; ITGB7; ILK; PDGFRB; INSR; |
| | RAF1; IKBKG; CASP9; CDKN1A; ITGB1; MAP2K2; |
| | AKT1; PIK3R1; CHUK; PDGFRA; PDPK1; MAP2K1; |
| | NFKB1; ITGB3; CDC42; CCND1; GSK3A; ITGA2; |
| | GSK3B; AKT3; FOXO1; CASP3; RPS6KB1 |
| p53 Signaling | PTEN; EP300; BBC3; PCAF; FASN; BRCA1; GADD45A; |
| | BIRC5; AKT2; PIK3CA; CHEK1; TP53INP1; BCL2; |
| | PIK3CB; PIK3C3; MAPK8; THBS1; ATR; BCL2L1; E2F1; |
| | PMAIP1; CHEK2; TNFRSF10B; TP73; RB1; HDAC9; |
| | CDK2; PIK3C2A; MAPK14; TP53; LRDD; CDKN1A; |
| | HIPK2; AKT1; PIK3R1; RRM2B; APAF1; CTNNB1; |
| | SIRT1; CCND1; PRKDC; ATM; SFN; CDKN2A; JUN; |
| | SNAI2; GSK3B; BAX; AKT3 |
| Aryl Hydrocarbon Receptor | HSPB1; EP300; FASN; TGM2; RXRA; MAPK1; NQO1; |
| Signaling | NCOR2; SP1; ARNT; CDKN1B; FOS; CHEK1; |
| | SMARCA4; NFKB2; MAPK8; ALDH1A1; ATR; E2F1; |
| | MAPK3; NRIP1; CHEK2; RELA; TP73; GSTP1; RB1; |
| | SRC; CDK2; AHR; NFE2L2; NCOA3; TP53; TNF; |
| | CDKN1A; NCOA2; APAF1; NFKB1; CCND1; ATM; ESR1; |
| | CDKN2A; MYC; JUN; ESR2; BAX; IL6; CYP1B1; |
| | HSP90AA1 |
| Xenobiotic Metabolism | PRKCE; EP300; PRKCZ; RXRA; MAPK1; NQO1; |
| Signaling | NCOR2; PIK3CA; ARNT; PRKCI; NFKB2; CAMK2A; |
| | PIK3CB; PPP2R1A; PIK3C3; MAPK8; PRKD1; |
| | ALDH1A1; MAPK3; NRIP1; KRAS; MAPK13; PRKCD; |
| | GSTP1; MAPK9; NOS2A; ABCB1; AHR; PPP2CA; FTL; |
| | NFE2L2; PIK3C2A; PPARGC1A; MAPK14; TNF; RAF1; |
| | CREBBP; MAP2K2; PIK3R1; PPP2R5C; MAP2K1; |
| | NFKB1; KEAP1; PRKCA; EIF2AK3; IL6; CYP1B1; |
| | HSP90AA1 |
| SAPK/JNK Signaling | PRKCE; IRAK1; PRKAA2; EIF2AK2; RAC1; ELK1; |
| | GRK6; MAPK1; GADD45A; RAC2; PLK1; AKT2; PIK3CA; |
| | FADD; CDK8; PIK3CB; PIK3C3; MAPK8; RIPK1; |
| | GNB2L1; IRS1; MAPK3; MAPK10; DAXX; KRAS; |
| | PRKCD; PRKAA1; MAPK9; CDK2; PIM1; PIK3C2A; |
| | TRAF2; TP53; LCK; MAP3K7; DYRK1A; MAP2K2; |
| | PIK3R1; MAP2K1; PAK3; CDC42; JUN; TTK; CSNK1A1; |
| | CRKL; BRAF; SGK |
| PPAr/RXR Signaling | PRKAA2; EP300; INS; SMAD2; TRAF6; PPARA; FASN; |
| | RXRA; MAPK1; SMAD3; GNAS; IKBKB; NCOR2; |
| | ABCA1; GNAQ; NFKB2; MAP3K14; STAT5B; MAPK8; |
| | IRS1; MAPK3; KRAS; RELA; PRKAA1; PPARGC1A; |
| | NCOA3; MAPK14; INSR; RAF1; IKBKG; RELB; MAP3K7; |
| | CREBBP; MAP2K2; JAK2; CHUK; MAP2K1; NFKB1; |
| | TGFBR1; SMAD4; JUN; IL1R1; PRKCA; IL6; HSP90AA1; |
| | ADIPOQ |
| NF-KB Signaling | IRAK1; EIF2AK2; EP300; INS; MYD88; PRKCZ; TRAF6; |
| | TBK1; AKT2; EGFR; IKBKB; PIK3CA; BTRC; NFKB2; |
| | MAP3K14; PIK3CB; PIK3C3; MAPK8; RIPK1; HDAC2; |
| | KRAS; RELA; PIK3C2A; TRAF2; TLR4; PDGFRB; TNF; |
| | INSR; LCK; IKBKG; RELB; MAP3K7; CREBBP; AKT1; |
| | PIK3R1; CHUK; PDGFRA; NFKB1; TLR2; BCL10; |
| | GSK3B; AKT3; TNFAIP3; IL1R1 |
| Neuregulin Signaling | ERBB4; PRKCE; ITGAM; ITGA5; PTEN; PRKCZ; ELK1; |
| | MAPK1; PTPN11; AKT2; EGFR; ERBB2; PRKCI; |
| | CDKN1B; STAT5B; PRKD1; MAPK3; ITGA1; KRAS; |
| | PRKCD; STAT5A; SRC; ITGB7; RAF1; ITGB1; MAP2K2; |
| | ADAM17; AKT1; PIK3R1; PDPK1; MAP2K1; ITGB3; |
| | EREG; FRAP1; PSEN1; ITGA2; MYC; NRG1; CRKL; |
| | AKT3; PRKCA; HSP90AA1; RPS6KB1 |
| Wnt & Beta catenin | CD44; EP300; LRP6; DVL3; CSNK1E; GJA1; SMO; |
| Signaling | AKT2; PIN1; CDH1; BTRC; GNAQ; MARK2; PPP2R1A; |
| | WNT11; SRC; DKK1; PPP2CA; SOX6; SFRP2; ILK; |
| | LEF1; SOX9; TP53; MAP3K7; CREBBP; TCF7L2; AKT1; |
| | PPP2R5C; WNT5A; LRP5; CTNNB1; TGFBR1; CCND1; |
| | GSK3A; DVL1; APC; CDKN2A; MYC; CSNK1A1; GSK3B; |
| | AKT3; SOX2 |
| Insulin Receptor Signaling | PTEN; INS; EIF4E; PTPN1; PRKCZ; MAPK1; TSC1; |
| | PTPN11; AKT2; CBL; PIK3CA; PRKCI; PIK3CB; PIK3C3; |
| | MAPK8; IRS1; MAPK3; TSC2; KRAS; EIF4EBP1; |
| | SLC2A4; PIK3C2A; PPP1CC; INSR; RAF1; FYN; |
| | MAP2K2; JAK1; AKT1; JAK2; PIK3R1; PDPK1; MAP2K1; |
| | GSK3A; FRAP1; CRKL; GSK3B; AKT3; FOXO1; SGK; |
| | RPS6KB1 |
| IL-6 Signaling | HSPB1; TRAF6; MAPKAPK2; ELK1; MAPK1; PTPN11; |
| | IKBKB; FOS; NFKB2; MAP3K14; MAPK8; MAPK3; |
| | MAPK10; IL6ST; KRAS; MAPK13; IL6R; RELA; SOCS1; |
| | MAPK9; ABCB1; TRAF2; MAPK14; TNF; RAF1; IKBKG; |
| | RELB; MAP3K7; MAP2K2; IL8; JAK2; CHUK; STAT3; |
| | MAP2K1; NFKB1; CEBPB; JUN; IL1R1; SRF; IL6 |
| Hepatic Cholestasis | PRKCE; IRAK1; INS; MYD88; PRKCZ; TRAF6; PPARA; |
| | RXRA; IKBKB; PRKCI; NFKB2; MAP3K14; MAPK8; |
| | PRKD1; MAPK10; RELA; PRKCD; MAPK9; ABCB1; |
| | TRAF2; TLR4; TNF; INSR; IKBKG; RELB; MAP3K7; IL8; |
| | CHUK; NR1H2; TJP2; NFKB1; ESR1; SREBF1; FGFR4; |
| | JUN; IL1R1; PRKCA; IL6 |
| IGF-1 Signaling | IGF1; PRKCZ; ELK1; MAPK1; PTPN11; NEDD4; AKT2; |
| | PIK3CA; PRKCI; PTK2; FOS; PIK3CB; PIK3C3; MAPK8; |
| | IGF1R; IRS1; MAPK3; IGFBP7; KRAS; PIK3C2A; |
| | YWHAZ; PXN; RAF1; CASP9; MAP2K2; AKT1; PIK3R1; |
| | PDPK1; MAP2K1; IGFBP2; SFN; JUN; CYR61; AKT3; |
| | FOXO1; SRF; CTGF; RPS6KB1 |
| NRF2-mediated Oxidative | PRKCE; EP300; SOD2; PRKCZ; MAPK1; SQSTM1; |
| Stress Response | NQO1; PIK3CA; PRKCI; FOS; PIK3CB; PIK3C3; MAPK8; |
| | PRKD1; MAPK3; KRAS; PRKCD; GSTP1; MAPK9; FTL; |
| | NFE2L2; PIK3C2A; MAPK14; RAF1; MAP3K7; CREBBP; |
| | MAP2K2; AKT1; PIK3R1; MAP2K1; PPIB; JUN; KEAP1; |
| | GSK3B; ATF4; PRKCA; EIF2AK3; HSP90AA1 |
| Hepatic Fibrosis/Hepatic | EDN1; IGF1; KDR; FLT1; SMAD2; FGFR1; MET; PGF; |
| Stellate Cell Activation | SMAD3; EGFR; FAS; CSF1; NFKB2; BCL2; MYH9; |
| | IGF1R; IL6R; RELA; TLR4; PDGFRB; TNF; RELB; IL8; |
| | PDGFRA; NFKB1; TGFBR1; SMAD4; VEGFA; BAX; |
| | IL1R1; CCL2; HGF; MMP1; STAT1; IL6; CTGF; MMP9 |
| PPAR Signaling | EP300; INS; TRAF6; PPARA; RXRA; MAPK1; IKBKB; |
| | NCOR2; FOS; NFKB2; MAP3K14; STAT5B; MAPK3; |
| | NRIP1; KRAS; PPARG; RELA; STATSA; TRAF2; |
| | PPARGC1A; PDGFRB; TNF; INSR; RAF1; IKBKG; |
| | RELB; MAP3K7; CREBBP; MAP2K2; CHUK; PDGFRA; |
| | MAP2K1; NFKB1; JUN; IL1R1; HSP90AA1 |
| Fc Epsilon RI Signaling | PRKCE; RAC1; PRKCZ; LYN; MAPK1; RAC2; PTPN11; |
| | AKT2; PIK3CA; SYK; PRKCI; PIK3CB; PIK3C3; MAPK8; |
| | PRKD1; MAPK3; MAPK 10; KRAS; MAPK13; PRKCD; |
| | MAPK9; PIK3C2A; BTK; MAPK14; TNF; RAF1; FYN; |
| | MAP2K2; AKT1; PIK3R1; PDPK1; MAP2K1; AKT3; |
| | VAV3; PRKCA |
| G-Protein Coupled | PRKCE; RAP1A; RGS16; MAPK1; GNAS; AKT2; IKBKB; |
| Receptor Signaling | PIK3CA; CREB1; GNAQ; NFKB2; CAMK2A; PIK3CB; |
| | PIK3C3; MAPK3; KRAS; RELA; SRC; PIK3C2A; RAF1; |
| | IKBKG; RELB; FYN; MAP2K2; AKT1; PIK3R1; CHUK; |
| | PDPK1; STAT3; MAP2K1; NFKB1; BRAF; ATF4; AKT3; |
| | PRKCA |
| Inositol Phosphate | PRKCE; IRAK1; PRKAA2; EIF2AK2; PTEN; GRK6; |
| Metabolism | MAPK1; PLK1; AKT2; PIK3CA; CDK8; PIK3CB; PIK3C3; |
| | MAPK8; MAPK3; PRKCD; PRKAA1; MAPK9; CDK2; |
| | PIM1; PIK3C2A; DYRK1A; MAP2K2; PIP5K1A; PIK3R1; |
| | MAP2K1; PAK3; ATM; TTK; CSNK1A1; BRAF; SGK |
| PDGF Signaling | EIF2AK2; ELK1; ABL2; MAPK1; PIK3CA; FOS; PIK3CB; |
| | PIK3C3; MAPK8; CAV1; ABL1; MAPK3; KRAS; SRC; |
| | PIK3C2A; PDGFRB; RAF1; MAP2K2; JAK1; JAK2; |
| | PIK3R1; PDGFRA; STAT3; SPHK1; MAP2K1; MYC; |
| | JUN; CRKL; PRKCA; SRF; STAT1; SPHK2 |
| VEGF Signaling | ACTN4; ROCK1; KDR; FLT1; ROCK2; MAPK1; PGF; |
| | AKT2; PIK3CA; ARNT; PTK2; BCL2; PIK3CB; PIK3C3; |
| | BCL2L1; MAPK3; KRAS; HIF1A; NOS3; PIK3C2A; PXN; |
| | RAF1; MAP2K2; ELAVL1; AKT1; PIK3R1; MAP2K1; SFN; |
| | VEGFA; AKT3; FOXO1; PRKCA |
| Natural Killer Cell Signaling | PRKCE; RAC1; PRKCZ; MAPK1; RAC2; PTPN11; |
| | KIR2DL3; AKT2; PIK3CA; SYK; PRKCI; PIK3CB; |
| | PIK3C3; PRKD1; MAPK3; KRAS; PRKCD; PTPN6; |
| | PIK3C2A; LCK; RAF1; FYN; MAP2K2; PAK4; AKT1; |
| | PIK3R1; MAP2K1; PAK3; AKT3; VAV3; PRKCA |
| Cell Cycle: G1/S | HDAC4; SMAD3; SUV39H1; HDAC5; CDKN1B; BTRC; |
| Checkpoint Regulation | ATR; ABL1; E2F1; HDAC2; HDAC7A; RB1; HDAC11; |
| | HDAC9; CDK2; E2F2; HDAC3; TP53; CDKN1A; CCND1; |
| | E2F4; ATM; RBL2; SMAD4; CDKN2A; MYC; NRG1; |
| | GSK3B; RBL1; HDAC6 |
| T Cell Receptor Signaling | RAC1; ELK1; MAPK1; IKBKB; CBL; PIK3CA; FOS; |
| | NFKB2; PIK3CB; PIK3C3; MAPK8; MAPK3; KRAS; |
| | RELA; PIK3C2A; BTK; LCK; RAF1; IKBKG; RELB; FYN; |
| | MAP2K2; PIK3R1; CHUK; MAP2K1; NFKB1; ITK; BCL10; |
| | JUN; VAV3 |
| Death Receptor Signaling | CRADD; HSPB1; BID; BIRC4; TBK1; IKBKB; FADD; |
| | FAS; NFKB2; BCL2; MAP3K14; MAPK8; RIPK1; CASP8; |
| | DAXX; TNFRSF10B; RELA; TRAF2; TNF; IKBKG; RELB; |
| | CASP9; CHUK; APAF1; NFKB1; CASP2; BIRC2; CASP3; |
| | BIRC3 |
| FGF Signaling | RAC1; FGFR1; MET; MAPKAPK2; MAPK1; PTPN11; |
| | AKT2; PIK3CA; CREB1; PIK3CB; PIK3C3; MAPK8; |
| | MAPK3; MAPK13; PTPN6; PIK3C2A; MAPK14; RAF1; |
| | AKT1; PIK3R1; STAT3; MAP2K1; FGFR4; CRKL; ATF4; |
| | AKT3; PRKCA; HGF |
| GM-CSF Signaling | LYN; ELK1; MAPK1; PTPN11; AKT2; PIK3CA; CAMK2A; |
| | STAT5B; PIK3CB; PIK3C3; GNB2L1; BCL2L1; MAPK3; |
| | ETS1; KRAS; RUNX1; PIM1; PIK3C2A; RAF1; MAP2K2; |
| | AKT1; JAK2; PIK3R1; STAT3; MAP2K1; CCND1; AKT3; |
| | STAT1 |
| Amyotrophic Lateral | BID; IGF1; RAC1; BIRC4; PGF; CAPNS1; CAPN2; |
| Sclerosis Signaling | PIK3CA; BCL2; PIK3CB; PIK3C3; BCL2L1; CAPN1; |
| | PIK3C2A; TP53; CASP9; PIK3R1; RAB5A; CASP1; |
| | APAF1; VEGFA; BIRC2; BAX; AKT3; CASP3; BIRC3 |
| JAK/Stat Signaling | PTPN1; MAPK1; PTPN11; AKT2; PIK3CA; STAT5B; |
| | PIK3CB; PIK3C3; MAPK3; KRAS; SOCS1; STAT5A; |
| | PTPN6; PIK3C2A; RAF1; CDKN1A; MAP2K2; JAK1; |
| | AKT1; JAK2; PIK3R1; STAT3; MAP2K1; FRAP1; AKT3; |
| | STAT1 |
| Nicotinate and Nicotinamide | PRKCE; IRAK1; PRKAA2; EIF2AK2; GRK6; MAPK1; |
| Metabolism | PLK1; AKT2; CDK8; MAPK8; MAPK3; PRKCD; PRKAA1; |
| | PBEF 1; MAPK9; CDK2; PIM1; DYRK1A; MAP2K2; |
| | MAP2K1; PAK3; NT5E; TTK; CSNK1A1; BRAF; SGK |
| Chemokine Signaling | CXCR4; ROCK2; MAPK1; PTK2; FOS; CFL1; GNAQ; |
| | CAMK2A; CXCL12; MAPK8; MAPK3; KRAS; MAPK13; |
| | RHOA; CCR3; SRC; PPP1CC; MAPK14; NOX1; RAF1; |
| | MAP2K2; MAP2K1; JUN; CCL2; PRKCA |
| IL-2 Signaling | ELK1; MAPK1; PTPN11; AKT2; PIK3CA; SYK; FOS; |
| | STAT5B; PIK3CB; PIK3C3; MAPK8; MAPK3; KRAS; |
| | SOCS1; STAT5A; PIK3C2A; LCK; RAF1; MAP2K2; |
| | JAK1; AKT1; PIK3R1; MAP2K1; JUN; AKT3 |
| Synaptic Long Term | PRKCE; IGF1; PRKCZ; PRDX6; LYN; MAPK1; GNAS; |
| Depression | PRKCI; GNAQ; PPP2R1A; IGF1R; PRKD1; MAPK3; |
| | KRAS; GRN; PRKCD; NOS3; NOS2A; PPP2CA; |
| | YWHAZ; RAF1; MAP2K2; PPP2R5C; MAP2K1; PRKCA |
| Estrogen Receptor | TAF4B; EP300; CARM1; PCAF; MAPK1; NCOR2; |
| Signaling | SMARCA4; MAPK3; NRIP1; KRAS; SRC; NR3C1; |
| | HDAC3; PPARGC1A; RBM9; NCOA3; RAF1; CREBBP; |
| | MAP2K2; NCOA2; MAP2K1; PRKDC; ESR1; ESR2 |
| Protein Ubiquitination | TRAF6; SMURF1; BIRC4; BRCA1; UCHL1; NEDD4; |
| Pathway | CBL; UBE21; BTRC; HSPA5; USP7; USP10; FBXW7; |
| | USP9X; STUB1; USP22; B2M; BIRC2; PARK2; USP8; |
| | USP1; VHL; HSP90AA1; BIRC3 |
| IL-10 Signaling | TRAF6; CCR1; ELK1; IKBKB; SP1; FOS; NFKB2; |
| | MAP3K14; MAPK8; MAPK 13; RELA; MAPK14; TNF; |
| | IKBKG; RELB; MAP3K7; JAK1; CHUK; STAT3; NFKB1; |
| | JUN; IL1R1; IL6 |
| VDR/RXR Activation | PRKCE; EP300; PRKCZ; RXRA; GADD45A; HES1; |
| | NCOR2; SP1; PRKCI; CDKN1B; PRKD1; PRKCD; |
| | RUNX2; KLF4; YY1; NCOA3; CDKN1A; NCOA2; SPP1; |
| | LRP5; CEBPB; FOXO1; PRKCA |
| TGF-beta Signaling | EP300; SMAD2; SMURF1; MAPK1; SMAD3; SMAD1; |
| | FOS; MAPK8; MAPK3; KRAS; MAPK9; RUNX2; |
| | SERPINE1; RAF1; MAP3K7; CREBBP; MAP2K2; |
| | MAP2K1; TGFBR1; SMAD4; JUN; SMAD5 |
| Toll-like Receptor Signaling | IRAK1; EIF2AK2; MYD88; TRAF6; PPARA; ELK1; |
| | IKBKB; FOS; NFKB2; MAP3K14; MAPK8; MAPK13; |
| | RELA; TLR4; MAPK14; IKBKG; RELB; MAP3K7; CHUK; |
| | NFKB1; TLR2; JUN |
| p38 MAPK Signaling | HSPB1; IRAK1; TRAF6; MAPKAPK2; ELK1; FADD; FAS; |
| | CREB1; DDIT3; RPS6KA4; DAXX; MAPK13; TRAF2; |
| | MAPK14; TNF; MAP3K7; TGFBR1; MYC; ATF4; IL1R1; |
| | SRF; STAT1 |
| Neurotrophin/TRK Signaling | NTRK2; MAPK1; PTPN11; PIK3CA; CREB1; FOS; |
| | PIK3CB; PIK3C3; MAPK8; MAPK3; KRAS; PIK3C2A; |
| | RAF1; MAP2K2; AKT1; PIK3R1; PDPK1; MAP2K1; |
| | CDC42; JUN; ATF4 |
| FXR/RXR Activation | INS; PPARA; FASN; RXRA; AKT2; SDC1; MAPK8; |
| | APOB; MAPK10; PPARG; MTTP; MAPK9; PPARGC1A; |
| | TNF; CREBBP; AKT1; SREBF1; FGFR4; AKT3; FOXO1 |
| Synaptic Long Term | PRKCE; RAP1A; EP300; PRKCZ; MAPK1; CREB1; |
| Potentiation | PRKCI; GNAQ; CAMK2A; PRKD1; MAPK3; KRAS; |
| | PRKCD; PPP1CC; RAF1; CREBBP; MAP2K2; MAP2K1; |
| | ATF4; PRKCA |
| Calcium Signaling | RAP1A; EP300; HDAC4; MAPK1; HDAC5; CREB1; |
| | CAMK2A; MYH9; MAPK3; HDAC2; HDAC7A; HDAC11; |
| | HDAC9; HDAC3; CREBBP; CALR; CAMKK2; ATF4; |
| | HDAC6 |
| EGF Signaling | ELK1; MAPK1; EGFR; PIK3CA; FOS; PIK3CB; PIK3C3; |
| | MAPK8; MAPK3; PIK3C2A; RAF1; JAK1; PIK3R1; |
| | STAT3; MAP2K1; JUN; PRKCA; SRF; STAT1 |
| Hypoxia Signaling in the | EDN1; PTEN; EP300; NQO1; UBE21; CREB1; ARNT; |
| Cardiovascular System | HIF1A; SLC2A4; NOS3; TP53; LDHA; AKT1; ATM; |
| | VEGFA; JUN; ATF4; VHL; HSP90AA1 |
| LPS/IL-1 Mediated Inhibition | IRAK1; MYD88; TRAF6; PPARA; RXRA; ABCA1; |
| of RXR Function | MAPK8; ALDH1A1; GSTP1; MAPK9; ABCB1; TRAF2; |
| | TLR4; TNF; MAP3K7; NR1H2; SREBF1; JUN; IL1R1 |
| LXR/RXR Activation | FASN; RXRA; NCOR2; ABCA1; NFKB2; IRF3; RELA; |
| | NOS2A; TLR4; TNF; RELB; LDLR; NR1H2; NFKB1; |
| | SREBF1; IL1R1; CCL2; IL6; MMP9 |
| Amyloid Processing | PRKCE; CSNK1E; MAPK1; CAPNS1; AKT2; CAPN2; |
| | CAPN1; MAPK3; MAPK13; MAPT; MAPK14; AKT1; |
| | PSEN1; CSNK1A1; GSK3B; AKT3; APP |
| IL-4 Signaling | AKT2; PIK3CA; PIK3CB; PIK3C3; IRS1; KRAS; SOCS1; |
| | PTPN6; NR3C1; PIK3C2A; JAK1; AKT1; JAK2; PIK3R1; |
| | FRAP1; AKT3; RPS6KB1 |
| Cell Cycle: G2/M DNA | EP300; PCAF; BRCA1; GADD45A; PLK1; BTRC; |
| Damage Checkpoint | CHEK1; ATR; CHEK2; YWHAZ; TP53; CDKN1A; |
| Regulation | PRKDC; ATM; SFN; CDKN2A |
| Nitric Oxide Signaling in the | KDR; FLT1; PGF; AKT2; PIK3CA; PIK3CB; PIK3C3; |
| Cardiovascular System | CAV1; PRKCD; NOS3; PIK3C2A; AKT1; PIK3R1; |
| | VEGFA; AKT3; HSP90AA1 |
| Purine Metabolism | NME2; SMARCA4; MYH9; RRM2; ADAR; EIF2AK4; |
| | PKM2; ENTPD1; RAD51; RRM2B; TJP2; RAD51C; |
| | NT5E; POLD1; NME1 |
| CAMP-mediated Signaling | RAP1A; MAPK1; GNAS; CREB1; CAMK2A; MAPK3; |
| | SRC; RAF1; MAP2K2; STAT3; MAP2K1; BRAF; ATF4 |
| Mitochondrial Dysfunction | SOD2; MAPK8; CASP8; MAPK10; MAPK9; CASP9; |
| Notch Signaling | PARK7; PSEN1; PARK2; APP; CASP3 |
| | HES1; JAG1; NUMB; NOTCH4; ADAM17; NOTCH2; |
| | PSEN1; NOTCH3; NOTCH1; DLL4 |
| Endoplasmic Reticulum | HSPA5; MAPK8; XBP1; TRAF2; ATF6; CASP9; ATF4; |
| Stress Pathway | EIF2AK3; CASP3 |
| Pyrimidine Metabolism | NME2; AICDA; RRM2; EIF2AK4; ENTPD1; RRM2B; |
| | NT5E; POLD1; NME1 |
| Parkinson's Signaling | UCHL1; MAPK8; MAPK13; MAPK14; CASP9; PARK7; |
| | PARK2; CASP3 |
| Cardiac & Beta Adrenergic | GNAS; GNAQ; PPP2R1A; GNB2L1; PPP2CA; PPP1CC; |
| Signaling | PPP2R5C |
| Glycolysis/Gluconeogenesis | HK2; GCK; GPI; ALDH1A1; PKM2; LDHA; HK1 |
| Interferon Signaling | IRF1; SOCS1; JAK1; JAK2; IFITM1; STAT1; IFIT3 |
| Sonic Hedgehog Signaling | ARRB2; SMO; GLI2; DYRK1A; GLI1; GSK3B; DYRK1B |
| Glycerophospholipid | PLD1; GRN; GPAM; YWHAZ; SPHK1; SPHK2 |
| Metabolism | |
| Phospholipid Degradation | PRDX6; PLD1; GRN; YWHAZ; SPHK1; SPHK2 |
| Tryptophan Metabolism | SIAH2; PRMT5; NEDD4; ALDH1A1; CYP1B1; SIAH1 |
| Lysine Degradation | SUV39H1; EHMT2; NSD1; SETD7; PPP2R5C |
| Nucleotide Excision Repair | ERCC5; ERCC4; XPA; XPC; ERCC1 |
| Pathway | |
| Starch and Sucrose | UCHL1; HK2; GCK; GPI; HK1 |
| Metabolism | |
| Aminosugars Metabolism | NQO1; HK2; GCK; HK1 |
| Arachidonic Acid | PRDX6; GRN; YWHAZ; CYP1B1 |
| Metabolism | |
| Circadian Rhythm Signaling | CSNK1E; CREB1; ATF4; NR1D1 |
| Coagulation System | BDKRB1; F2R; SERPINE1; F3 |
| Dopamine Receptor | PPP2R1A; PPP2CA; PPP1CC; PPP2R5C |
| Signaling | |
| Glutathione Metabolism | IDH2; GSTP1; ANPEP; IDH1 |
| Glycerolipid Metabolism | ALDH1A1; GPAM; SPHK1; SPHK2 |
| Linoleic Acid Metabolism | PRDX6; GRN; YWHAZ; CYP1B1 |
| Methionine Metabolism | DNMT1; DNMT3B; AHCY; DNMT3A |
| Pyruvate Metabolism | GLO1; ALDH1A1; PKM2; LDHA |
| Arginine and Proline | ALDH1A1; NOS3; NOS2A |
| Metabolism | |
| Eicosanoid Signaling | PRDX6; GRN; YWHAZ |
| Fructose and Mannose | HK2; GCK; HK1 |
| Metabolism | |
| Galactose Metabolism | HK2; GCK; HK1 |
| Stilbene, Coumarine and | PRDX6; PRDX1; TYR |
| Lignin Biosynthesis | |
| Antigen Presentation | CALR; B2M |
| Pathway | |
| Biosynthesis of Steroids | NQO1; DHCR7 |
| Butanoate Metabolism | ALDH1A1; NLGN1 |
| Citrate Cycle | IDH2; IDH1 |
| Fatty Acid Metabolism | ALDH1A1; CYP1B1 |
| Glycerophospholipid | PRDX6; CHKA |
| Metabolism | |
| Histidine Metabolism | PRMT5; ALDH1A1 |
| Inositol Metabolism | ERO1L; APEX1 |
| Metabolism of Xenobiotics | GSTP1; CYP1B1 |
| by Cytochrome p450 | |
| Methane Metabolism | PRDX6; PRDX1 |
| Phenylalanine Metabolism | PRDX6; PRDX1 |
| Propanoate Metabolism | ALDH1A1; LDHA |
| Selenoamino Acid | PRMT5; AHCY |
| Metabolism | |
| Sphingolipid Metabolism | SPHK1; SPHK2 |
| Aminophosphonate | PRMT5 |
| Metabolism | |
| Androgen and Estrogen | PRMT5 |
| Metabolism | |
| Ascorbate and Aldarate | ALDH1A1 |
| Metabolism | |
| Bile Acid Biosynthesis | ALDH1A1 |
| Cysteine Metabolism | LDHA |
| Fatty Acid Biosynthesis | FASN |
| Glutamate Receptor | GNB2L1 |
| Signaling | |
| NRF2-mediated Oxidative | PRDX1 |
| Stress Response | |
| Pentose Phosphate | GPI |
| Pathway | |
| Pentose and Glucuronate | UCHL1 |
| Interconversions | |
| Retinol Metabolism | ALDH1A1 |
| Riboflavin Metabolism | TYR |
| Tyrosine Metabolism | PRMT5, TYR |
| Ubiquinone Biosynthesis | PRMT5 |
| Valine, Leucine and | ALDH1A1 |
| Isoleucine Degradation | |
| Glycine, Serine and | CHKA |
| Threonine Metabolism | |
| Lysine Degradation | ALDH1A1 |
| Pain/Taste | TRPM5; TRPA1 |
| Pain | TRPM7; TRPC5; TRPC6; TRPC1; Cnr1; cnr2; Grk2; |
| | Trpa1; Pomc; Cgrp; Crf; Pka; Era; Nr2b; TRPM5; Prkaca; |
| | Prkacb; Prkar1a; Prkar2a |
| Mitochondrial Function | AIF; CytC; SMAC (Diablo); Aifm-1; Aifm-2 |
| Developmental Neurology | BMP-4; Chordin (Chrd); Noggin (Nog); WNT (Wnt2; |
| | Wnt2b; Wnt3a; Wnt4; Wnt5a; Wnt6; Wnt7b; Wnt8b; |
| | Wnt9a; Wnt9b; Wnt10a; Wnt10b; Wnt16); beta-catenin; |
| | Dkk-1; Frizzled related proteins; Otx-2; Gbx2; FGF-8; |
| | Reelin; Dab1; unc-86 (Pou4f1 or Brn3a); Numb; Reln |

[0960] Further non-limiting examples of disease-associated genes and polynucleotides and disease specific information is available from McKusick-Nathans Institute of Genetic Medicine, Johns Hopkins University (Baltimore, Md.) and National Center for Biotechnology Information, National Library of Medicine (Bethesda, Md.), available on the World Wide Web.

[0961] In some embodiments, a method of individualized or personalized treatment of a genetic disease in a subject in need of such treatment includes: (a) introducing one or more mutations ex vivo in a tissue, organ or a cell line, or in vivo in a transgenic non-human mammal, comprising delivering to cell(s) of the tissue, organ, cell or mammal a composition comprising the particle delivery system or the delivery system or the virus particle of any one of the above embodiment or the cell of any one of the above embodiment, wherein the specific mutations or precise sequence substitutions are or have been correlated to the genetic disease; (b) testing treatment(s) for the genetic disease on the cells to which the vector has been delivered that have the specific mutations or precise sequence substitutions correlated to the genetic disease; and (c) treating the subject based on results from the testing of treatment(s) of step (b).

### Infectious Diseases

[0962] In some embodiments, the CRISPR-Cas system(s) or component(s) thereof can be used to diagnose, prognose, treat, and/or prevent an infectious disease caused by a microorganism, such as bacteria, virus, fungi, parasites, or combinations thereof.

[0963] In some embodiments, the Cas system(s) or component(s) thereof can be capable of targeting specific microorganism within a mixed population. Exemplary methods of such techniques are described in e.g. Gomaa A A, Klumpe H E, Luo M L, Selle K, Barrangou R, Beisel C L. 2014. Programmable removal of bacterial strains by use of genome-targeting CRISPR-Cas systems. mBio 5:e00928-13; Citorik R J, Mimee M, Lu T K. 2014. Sequence-specific antimicrobials using efficiently delivered RNA-guided nucleases. Nat Biotechnol 32:1141-1145, the teachings of which can be adapted for use with the CRISPR-Cas systems and components thereof described herein.

[0964] In some embodiments, the CRISPR-Cas system(s) and/or components thereof can be capable of targeting pathogenic and/or drug-resistant microorganisms, such as bacteria, virus, parasites, and fungi. In some embodiments, the CRISPR-Cas system(s) and/or components thereof can be capable of targeting and modifying one or more polynucleotides in a pathogenic microorganism such that the microorganism is less virulent, killed, inhibited, or is otherwise rendered incapable of causing disease and/or infecting and/or replicating in a host cell.

[0965] In some embodiments, the pathogenic bacteria that can be targeted and/or modified by the CRISPR-Cas system(s) and/or component(s) thereof described herein include, but are not limited to, those of the genus Actinomyces (e.g. A. israelii), Bacillus (e.g. B. anthracis, B. cereus), Bactereoides (e.g. B. fragilis), Bartonella (B. henselae, B. quintana), Bordetella (B. pertussis), Borrelia (e.g. B. burgdorferi, B. garinii, B. afzelii, and B. recurreentis), Brucella (e.g. B. abortus, B. canis, B. melitensis, and B. suis), Campylobacter (e.g. C. jejuni), Chlamydia (e.g. C. pneumoniae and C. trachomatis), Chlamydophila (e.g. C. psittaci), Clostridium (e.g. C. botulinum, C. difficile, C. perfringens. C. tetani), Corynebacterium (e.g. C. diptheriae), Enterococcus (e.g. E. faecalis, E. faecium), Ehrlichia (E. canis and E. chaffensis) Escherichia (e.g. E. coli), Francisella (e.g. F. tularensis), Haemophilus (e.g. H. influenzae), Helicobacter (H. pylori), Klebsiella (E.g. K. pneumoniae), Legionella (e.g. L. pneumophila), Leptospira (e.g. L. interrogans, L. santarosai, L. weilii, L. noguchii), Listeria (e.g. L. monocytogenes), Mycobacterium (e.g. M. leprae, M. tuberculosis, M. ulcerans), Mycoplasma (M. pneumoniae), Neisseria (N. gonorrhoeae and N. menigitidis), Nocardia (e.g. N. asteroides), Pseudomonas (P. aeruginosa), Rickettsia (R. rickettsia), Salmonella (S. typhi and S. typhimurium), Shigella (S. sonnei and S. dysenteriae), Staphylococcus (S. aureus, S. epidermidis, and S. saprophyticus), Streptococcus (S. agalactiae, S. pneumoniae, S. pyogenes), Treponema (T. pallidum), Ureaplasma (e.g. U. urealyticum), Vibrio (e.g. V. cholerae), Yersinia (e.g. Y pestis, Y, enterocolitica, and Y. pseudotuberculosis).

[0966] In some embodiments, the pathogenic virus that can be targeted and/or modified by the CRISPR-Cas system(s) and/or component(s) thereof described herein include, but are not limited to, a double-stranded DNA virus, a partly double-stranded DNA virus, a single-stranded DNA virus, a positive single-stranded RNA virus, a negative single-stranded RNA virus, or a double stranded RNA virus. In some embodiments, the pathogenic virus can be from the family Adenoviridae (e.g. Adenovirus), Herpesviridae (e.g. Herpes simplex, type 1, Herpes simplex, type 2, Varicella-zoster virus, Epstein-Barr virus, Human cytomegalovirus, Human herpesvirus, type 8), Papillomaviridae (e.g. Human papillomavirus), Polyomaviridae (e.g. BK virus, JC virus), Poxviridae (e.g. smallpox), Hepadnaviridae (e.g. Hepatitis B), Parvoviridae (e.g. Parvovirus B19), Astroviridae (e.g. Human astrovirus), Caliciviridae (e.g. Norwalk virus), Picornaviridae (e.g. coxsackievirus, hepatitis A virus, poliovirus, rhinovirus), Coronaviridae (e.g. Severe acute respiratory syndrome-related coronavirus, strains: Severe acute respiratory syndrome virus, Severe acute respiratory syndrome coronavirus 2 (COVID-19)), Flaviviridae (e.g. Hepatitis C virus, yellow fever virus, dengue virus, West Nile virus, TBE virus), Togaviridae (e.g. Rubella virus), Hepeviridae (e.g. Hepatitis E virus), Retroviridae (Human immunodeficiency virus (HIV)), Orthomyxoviridae (e.g. Influenza virus), Arenaviridae (e.g. Lassa virus), Bunyaviridae (e.g. Crimean-Congo hemorrhagic fever virus, Hantaan virus), Filoviridae (e.g. Ebola virus and Marburg virus), Paramyxoviridae (e.g. Measles virus, Mumps virus, Parainfluenza virus, Respiratory syncytial virus), Rhabdoviridae (Rabies virus), Hepatitis D virus, Reoviridae (e.g. Rotavirus, Orbivirus, Coltivirus, Banna virus).

[0967] In some embodiments, the pathogenic fungi that can be targeted and/or modified by the CRISPR-Cas system(s) and/or component(s) thereof described herein include, but are not limited to, those of the genus Candida (e.g. C. albicans), Aspergillus (e.g. A. fumigatus, A. flavus, A. clavatus), Cryptococcus (e.g. C. neoformans, C. gattii), Histoplasma (H. capsulatum), Pneumocystis (e.g. P. jiroveecii), Stachybotrys (e.g. S. chartarum).

[0968] In some embodiments, the pathogenic parasites that can be targeted and/or modified by the CRISPR-Cas system(s) and/or component(s) thereof described herein include, but are not limited to, protozoa, helminths, and ectoparasites. In some embodiments, the pathogenic protozoa that can be targeted and/or modified by the CRISPR-Cas system(s) and/or component(s) thereof described herein include, but are not limited to, those from the groups Sarcodina (e.g. ameba such as Entamoeba), Mastigophora (e.g. flagellates such as Giardia and Leishmania), Cilophora (e.g. ciliates such as Balantidum), and sporozoa (e.g. Plasmodium and Cryptosporidium). In some embodiments, the pathogenic helminths that can be targeted and/or modified by the CRISPR-Cas system(s) and/or component(s) thereof described herein include, but are not limited to, flatworms (platyhelminths), thorny-headed worms (acanthoceephalins), and roundworms (nematodes). In some embodiments, the pathogenic ectoparasites that can be targeted and/or modified by the CRISPR-Cas system(s) and/or component(s) thereof described herein include, but are not limited to, ticks, fleas, lice, and mites.

[0969] In some embodiments, the pathogenic parasite that can be targeted and/or modified by the CRISPR-Cas system(s) and/or component(s) thereof described herein include, but are not limited to, Acanthamoeba spp., Balamuthia mandrillaris, Babesiosis spp. (e.g. Babesia B. divergens, B. bigemina, B. equi, B. microfti, B. duncani), Balantidiasis spp. (e.g. Balantidium coli), Blastocystis spp., Cryptosporidium spp., Cyclosporiasis spp. (e.g. Cyclospora cayetanensis), Dientamoebiasis spp. (e.g. Dientamoeba fragilis), Amoebiasis spp. (e.g. Entamoeba histolytica), Giardiasis spp. (e.g. Giardia lamblia), Isosporiasis spp. (e.g. Isospora belli), Leishmania spp., Naegleria spp. (e.g. Naegleria fowleri), Plasmodium spp. (e.g. Plasmodium falciparum, Plasmodium vivax, Plasmodium ovale curtisi, Plasmodium ovale wallikeri, Plasmodium malariae, Plasmodium knowlesi), Rhinosporidiosis spp. (e.g. Rhinosporidium seeberi), Sarcocystosis spp. (e.g. Sarcocystis bovihominis, Sarcocystis suihominis), Toxoplasma spp. (e.g. Toxoplasma gondii), Trichomonas spp. (e.g. Trichomonas vaginalis), Trypanosoma spp. (e.g. Trypanosoma brucei), Trypanosoma spp. (e.g. Trypanosoma cruzi), Tapeworm (e.g. Cestoda, Taenia multiceps, Taenia saginata, Taenia solium), Diphyllobothrium latum spp., Echinococcus spp. (e.g. Echinococcus granulosus, Echinococcus multilocularis, E. vogeli, E. oligarthrus), Hymenolepis spp. (e.g. Hymenolepis nana, Hymenolepis diminuta), Bertiella spp. (e.g. Bertiella mucronata, Bertiella studeri), Spirometra (e.g. Spirometra erinaceieuropaei), Clonorchis spp. (e.g. Clonorchis sinensis; Clonorchis viverrini), Dicrocoelium spp. (e.g. Dicrocoelium dendriticum), Fasciola spp. (e.g. Fasciola hepatica, Fasciola gigantica), Fasciolopsis spp. (e.g. Fasciolopsis buski), Metagonimus spp. (e.g. Metagonimus yokogawai), Metorchis spp. (e.g. Metorchis conjunctus), Opisthorchis spp. (e.g. Opisthorchis viverrini, Opisthorchis felineus), Clonorchis spp. (e.g. Clonorchis sinensis), Paragonimus spp. (e.g. Paragonimus westermani; Paragonimus africanus; Paragonimus caliensis; Paragonimus kellicotti; Paragonimus skrjabini; Paragonimus uterobilateralis), Schistosoma sp., Schistosoma spp. (e.g. Schistosoma mansoni, Schistosoma haematobium, Schistosoma japonicum, Schistosoma mekongi, and Schistosoma intercalatum), Echinostoma spp. (e.g. E. echinatum), Trichobilharzia spp. (e.g. Trichobilharzia regent), Ancylostoma spp. (e.g. Ancylostoma duodenale), Necator spp. (e.g. Necator americanus), Angiostrongylus spp., Anisakis spp., Ascaris spp. (e.g. Ascaris lumbricoides), Baylisascaris spp. (e.g. Baylisascaris procyonis), Brugia spp. (e.g. Brugia malayi, Brugia timori), Dioctophyme spp. (e.g. Dioctophyme renale), Dracunculus spp. (e.g. Dracunculus medinensis), Enterobius spp. (e.g. Enterobius vermicularis, Enterobius gregorii), Gnathostoma spp. (e.g. Gnathostoma spinigerum, Gnathostoma hispidum), Halicephalobus spp. (e.g. Halicephalobus gingivalis), Loa loa spp. (e.g. Loa loa filaria), Mansonella spp. (e.g. Mansonella streptocerca), Onchocerca spp. (e.g. Onchocerca volvulus), Strongyloides spp. (e.g. Strongyloides stercoralis), Thelazia spp. (e.g. Thelazia californiensis, Thelazia callipaeda), Toxocara spp. (e.g. Toxocara canis, Toxocara cati, Toxascaris leonine), Trichinella spp. (e.g. Trichinella spiralis, Trichinella britovi, Trichinella nelsoni, Trichinella nativa), Trichuris spp. (e.g. Trichuris trichiura, Trichuris vulpis), Wuchereria spp. (e.g. Wuchereria bancrofti), Dermatobia spp. (e.g. Dermatobia hominis), Tunga spp. (e.g. Tunga penetrans), Cochliomyia spp. (e.g. Cochliomyia hominivorax), Linguatula spp. (e.g. Linguatula serrata), Archiacanthocephala sp., Moniliformis sp. (e.g. Moniliformis moniliformis), Pediculus spp. (e.g. Pediculus humanus capitis, Pediculus humanus humanus), Pthirus spp. (e.g. Pthirus pubis), Arachnida spp. (e.g. Trombiculidae, Ixodidae, Argaside), Siphonaptera spp (e.g. Siphonaptera: Pulicinae), Cimicidae spp. (e.g. Cimex lectularius and Cimex hemipterus), Diptera spp., Demodex spp. (e.g. Demodex folliculorum/brevis/canis), Sarcoptes spp. (e.g. Sarcoptes scabiei), Dermanyssus spp. (e.g. Dermanyssus gallinae), Ornithonyssus spp. (e.g. Ornithonyssus sylviarum, Ornithonyssus bursa, Ornithonyssus bacoti), Laelaps spp. (e.g. Laelaps echidnina), Liponyssoides spp. (e.g. Liponyssoides sanguineus).

[0970] In some embodiments the gene targets can be any of those as set forth in Table 1 of Strich and Chertow. 2019. J. Clin. Microbio. 57:4 e01307-18, which is incorporated herein as if expressed in its entirety herein.

[0971] In some embodiments, the method can include delivering a CRISPR-Cas system and/or component thereof to a pathogenic organism described herein, allowing the CRISPR-Cas system and/or component thereof to specifically bind and modify one or more targets in the pathogenic organism, whereby the modification kills, inhibits, reduces the pathogenicity of the pathogenic organism, or otherwise renders the pathogenic organism non-pathogenic. In some embodiments, delivery of the CRISPR-Cas system occurs in vivo (i.e. in the subject being treated). In some embodiments occurs by an intermediary, such as microorganism or phage that is non-pathogenic to the subject but is capable of transferring polynucleotides and/or infecting the pathogenic microorganism. In some embodiments, the intermediary microorganism can be an engineered bacteria, virus, or phage that contains the CRISPR-Cas system(s) and/or component(s) thereof and/or CRISPR-Cas vectors and/or vector systems. The method can include administering an intermediary microorganism containing the CRISPR-Cas system(s) and/or component(s) thereof and/or CRISPR-Cas vectors and/or vector systems to the subject to be treated. The intermediary microorganism can then produce the CRISPR-system and/or component thereof or transfer a CRISPR-Cas system polynucleotide to the pathogenic organism. In embodiments, where the CRISPR-system and/or component thereof, vector, or vector system is transferred to the pathogenic microorganism, the CRISPR-Cas system or component thereof is then produced in the pathogenic microorganism and modifies the pathogenic microorganism such that it is less virulent, killed, inhibited, or is otherwise rendered incapable of causing disease and/or infecting and/or replicating in a host or cell thereof.

[0972] In some embodiments, where the pathogenic microorganism inserts its genetic material into the host cell's genome (e.g. a virus), the CRISPR-Cas system can be designed such that it modifies the host cell's genome such that the viral DNA or cDNA cannot be replicated by the host cell's machinery into a functional virus. In some embodiments, where the pathogenic microorganism inserts its genetic material into the host cell's genome (e.g. a virus), the CRISPR-Cas system can be designed such that it modifies the host cell's genome such that the viral DNA or cDNA is deleted from the host cell's genome.

[0973] It will be appreciated that inhibiting or killing the pathogenic microorganism, the disease and/or condition that its infection causes in the subject can be treated or prevented. Thus, also provided herein are methods of treating and/or preventing one or more diseases or symptoms thereof caused by any one or more pathogenic microorganisms, such as any of those described herein.

### Mitochondrial Diseases

[0974] Some of the most challenging mitochondrial disorders arise from mutations in mitochondrial DNA (mtDNA), a high copy number genome that is maternally inherited. In some embodiments, mtDNA mutations can be modified using a CRISPR-Cas system described herein. In some embodiments, the mitochondrial disease that can be diagnosed, prognosed, treated, and/or prevented can be MELAS (mitochondrial myopathy encephalopathy, and lactic acidosis and stroke-like episodes), CPEO/PEO (chronic progressive external ophthalmoplegia syndrome/progressive external ophthalmoplegia), KSS (Kearns-Sayre syndrome), MIDD (maternally inherited diabetes and deafness), MERRF (myoclonic epilepsy associated with ragged red fibers), NIDDM (noninsulin-dependent diabetes mellitus), LHON (Leber hereditary optic neuropathy), LS (Leigh Syndrome) an aminoglycoside induced hearing disorder, NARP (neuropathy, ataxia, and pigmentary retinopathy), Extrapyramidal disorder with akinesia-rigidity, psychosis and SNHL, Nonsyndromic hearing loss a cardiomyopathy, an encephalomyopathy, Pearson's syndrome, a disease identified as being caused or attributed to a mtDNA mutation set forth at mitomap.org, or a combination thereof.

[0975] In some embodiments, the mtDNA of a subject can be modified in vivo or ex vivo. In some embodiments, where the mtDNA is modified ex vivo, after modification the cells containing the modified mitochondria can be administered back to the subject. In some embodiments, the CRISPR-Cas system or component thereof can be capable of correcting an mtDNA mutation such as any one or more of those that can be found at mitomap.org.

[0976] In some embodiments, at least one of the one or more mtDNA mutations is selected from the group consisting of: A3243G, C3256T, T3271C, G1019A, A1304T, A15533G, C1494T, C4467A, T1658C, G12315A, A3421G, A8344G, T8356C, G8363A, A13042T, T3200C, G3242A, A3252G, T3264C, G3316A, T3394C, T14577C, A4833G, G3460A, G9804A, G11778A, G14459A, A14484G, G15257A, T8993C, T8993G, G10197A, G13513A, T1095C, C1494T, A1555G, G1541A, C1634T, A3260G, A4269G, T7587C, A8296G, A8348G, G8363A, T9957C, T9997C, G12192A, C12297T, A14484G, G15059A, duplication of CCCCCTCCCC-tandem repeats at positions 305-314 and/or 956-965, deletion at positions from 8,469-13,447, 4,308-14,874, and/or 4,398-14,822, 961ins/delC, the mitochondrial common deletion (e.g. mtDNA 4,977 bp deletion), and combinations thereof.

[0977] In some embodiments, the mitochondrial mutation can be any mutation as set forth in or as identified by use of one or more bioinformatic tools available at Mitomap available at mitomap.org. Such tools include, but are not limited to, “Variant Search, aka Market Finder”, Find Sequences for Any Haplogroup, aka “Sequence Finder”, “Variant Info”, “POLG Pathogenicity Prediction Server”, “MITOMASTER”, “Allele Search”, “Sequence and Variant Downloads”, “Data Downloads”. MitoMap contains reports of mutations in mtDNA that can be associated with disease and maintains a database of reported mitochondrial DNA Base Substitution Diseases: rRNA/tRNA mutations.

[0978] In some embodiments, the method includes delivering a CRISPR-Cas system and/or a component thereof to a cell, and more specifically one or more mitochondria in a cell, allowing the CRISPR-Cas system and/or component thereof to modify one or more target polynucleotides in the cell, and more specifically one or more mitochondria in the cell. The target polynucleotides can correspond to a mutation in the mtDNA, such as any one or more of those described herein. In some embodiments, the modification can alter a function of the mitochondria such that the mitochondria functions normally or at least is/are less dysfunctional as compared to an unmodified mitochondria. Modification can occur in vivo or ex vivo. Where modification is performed ex vivo, cells containing modified mitochondria can be administered to a subject in need thereof in an autologous or allogenic manner.

### Microbiome Modification

[0979] Microbiomes play important roles in health and disease. For example, the gut microbiome can play a role in health by controlling digestion, preventing growth of pathogenic microorganisms and have been suggested to influence mood and emotion and other neurologic and brain functions via what is termed in the art as the brain-gut axis. Imbalanced microbiomes can promote disease and are suggested to contribute to weight gain, unregulated blood sugar, high cholesterol, cancer, and other disorders. A healthy microbiome has a series of joint characteristics that can be distinguished from non-healthy individuals. Thus, detection and identification of the disease-associated microbiome can be used to diagnose and detect disease in an individual. The CRISPR-Cas systems and components thereof can be used to screen the microbiome cell population and be used to identify a disease associated microbiome. Cell screening methods utilizing CRISPR-Cas systems and components thereof are described elsewhere herein and can be applied to screening a microbiome, such as a gut, skin, vagina, nasal cavity, and/or oral microbiome, of a subject.

[0980] In some embodiments, the microbe population of a microbiome in a subject can be modified using a CRISPR-Cas system and/or component thereof described herein. In some embodiments, the CRISPR-Cas system and/or component thereof can be used to identify and select one or more cell types in the microbiome and remove them from the microbiome population. In some embodiments the CRISPR-Cas system can modify, in vitro or ex vivo, a bacterium of a genus, species, and/or strain suitable for introduction into a microbiome of a subject. After modification the modified bacterium can be administered to the subject via any suitable method for its introduction into a microbiome of a subject. Exemplary methods of selecting cells using a CRISPR-Cas system and/or component thereof are described elsewhere herein. In this way the make-up or microorganism profile of the microbiome can be altered. In some embodiments, the alteration causes a change from a diseased microbiome composition to a healthy microbiome composition. In this way the ratio of one type or species of microorganism to another can be modified, such as going from a diseased ratio to a healthy ratio. In some embodiments, the cells selected are pathogenic microorganisms.

[0981] In some embodiments, the CRISPR-Cas systems described herein can be used to modify a polynucleotide in a microorganism of a microbiome in a subject. In some embodiments, the microorganism is a pathogenic microorganism. In some embodiments, the microorganism is a commensal and non-pathogenic microorganism. Methods of modifying polynucleotides in a cell in the subject are described elsewhere herein and can be applied to these embodiments.

### Adoptive Therapy

[0982] The CRISPR-Cas systems and components thereof described herein can be used to modify cells for an adoptive cell therapy. It will be appreciated that any cell type can be used for adoptive therapy. In some embodiments, the adoptive therapy is autologous. In some embodiments, the adoptive therapy is allogenic. In general, adoptive therapy involves harvesting a cell from a source (autologous source (i.e. the subject to which the cells will be administered) or allogeneic source. After harvesting, the cells are cultured, optionally expanded (clonally or non-clonally), and modified using a CRISPR-Cas system described elsewhere herein, components thereof, and/or complex thereof. In some embodiments, further cell manipulations, sorting, and/or culturing, etc. are performed). After modification, the modified cells are then administered to the subject in need thereof. Although the exemplary embodiments described herein focus on adoptive therapy using immune cells, it will be appreciated that other cells may be suitable depending on the disease or condition being treated and/or desired outcome as will be appreciated by one of ordinary skill in the art in view of the disclosure herein.

[0983] Some embodiments involve the adoptive transfer of immune system cells, such as T cells, specific for selected antigens, such as tumor associated antigens (see Maus et al., 2014, Adoptive Immunotherapy for Cancer or Viruses, Annual Review of Immunology, Vol. 32: 189-225; Rosenberg and Restifo, 2015, Adoptive cell transfer as personalized immunotherapy for human cancer, Science Vol. 348 no. 6230 pp. 62-68; and, Restifo et al., 2015, Adoptive immunotherapy for cancer: harnessing the T cell response. Nat. Rev. Immunol. 12(4): 269-281; and Jenson and Riddell, 2014, Design and implementation of adoptive therapy with chimeric antigen receptor-modified T cells. Immunol Rev. 257(1): 127-144). Various strategies may for example be employed to genetically modify T cells by altering the specificity of the T cell receptor (TCR) for example by introducing new TCR α and β chains with selected peptide specificity (see U.S. Pat. No. 8,697,854; PCT Patent Publications: WO2003020763, WO2004033685, WO2004044004, WO2005114215, WO2006000830, WO2008038002, WO2008039818, WO2004074322, WO2005113595, WO2006125962, WO2013166321, WO2013039889, WO2014018863, WO2014083173; U.S. Pat. No. 8,088,379).

[0984] As an alternative to, or addition to, TCR modifications, chimeric antigen receptors (CARs) may be used in order to generate immunoresponsive cells, such as T cells, specific for selected targets, such as malignant cells, with a wide variety of receptor chimera constructs having been described (see U.S. Pat. Nos. 5,843,728; 5,851,828; 5,912,170; 6,004,811; 6,284,240; 6,392,013; 6,410,014; 6,753,162; 8,211,422; and, PCT Publication WO9215322). Alternative CAR constructs may be characterized as belonging to successive generations. First-generation CARs typically consist of a single-chain variable fragment of an antibody specific for an antigen, for example comprising a VL linked to a VH of a specific antibody, linked by a flexible linker, for example by a CD8α hinge domain and a CD8α transmembrane domain, to the transmembrane and intracellular signaling domains of either CD3ζ or FcRγ (scFv-CD3ζ or scFv-FcRγ; see U.S. Pat. Nos. 7,741,465; 5,912,172; 5,906,936). Second-generation CARs incorporate the intracellular domains of one or more costimulatory molecules, such as CD28, OX40 (CD134), or 4-1BB (CD137) within the endodomain (for example scFv-CD28/OX40/4-1BB-CD3ζ; see U.S. Pat. Nos. 8,911,993; 8,916,381; 8,975,071; 9,101,584; 9,102,760; 9,102,761). Third-generation CARs include a combination of costimulatory endodomains, such a CD3ζ-chain, CD97, GDI la-CD18, CD2, ICOS, CD27, CD154, CDS, OX40, 4-1BB, or CD28 signaling domains (for example scFv-CD28-4-1BB-CD3ζ or scFv-CD28-OX40-CD3ζ; see U.S. Pat. Nos. 8,906,682; 8,399,645; 5,686,281; PCT Publication No. WO2014134165; PCT Publication No. WO2012079000). Alternatively, co-stimulation may be orchestrated by expressing CARs in antigen-specific T cells, chosen so as to be activated and expanded following engagement of their native αβTCR, for example by antigen on professional antigen-presenting cells, with attendant co-stimulation. In addition, additional engineered receptors may be provided on the immunoresponsive cells, for example to improve targeting of a T-cell attack and/or minimize side effects.

[0985] Alternative techniques may be used to transform target immunoresponsive cells, such as protoplast fusion, lipofection, transfection or electroporation. A wide variety of vectors may be used, such as retroviral vectors, lentiviral vectors, adenoviral vectors, adeno-associated viral vectors, plasmids or transposons, such as a Sleeping Beauty transposon (see U.S. Pat. Nos. 6,489,458; 7,148,203; 7,160,682; 7,985,739; 8,227,432), may be used to introduce CARs, for example using 2nd generation antigen-specific CARs signaling through CD3ζ and either CD28 or CD137. Viral vectors may for example include vectors based on HIV, SV40, EBV, HSV or BPV.

[0986] Cells that are targeted for transformation may for example include T cells, Natural Killer (NK) cells, cytotoxic T lymphocytes (CTL), regulatory T cells, human embryonic stem cells, tumor-infiltrating lymphocytes (TIL) or a pluripotent stem cell from which lymphoid cells may be differentiated. T cells expressing a desired CAR may for example be selected through co-culture with γ-irradiated activating and propagating cells (AaPC), which co-express the cancer antigen and co-stimulatory molecules. The engineered CAR T-cells may be expanded, for example by co-culture on AaPC in presence of soluble factors, such as IL-2 and IL-21. This expansion may for example be carried out so as to provide memory CAR+ T cells (which may for example be assayed by non-enzymatic digital array and/or multi-panel flow cytometry). In this way, CAR T cells may be provided that have specific cytotoxic activity against antigen-bearing tumors (optionally in conjunction with production of desired chemokines such as interferon-γ). CAR T cells of this kind may for example be used in animal models, for example to threat tumor xenografts.

[0987] Approaches such as the foregoing may be adapted to provide methods of treating and/or increasing survival of a subject having a disease, such as a neoplasia, for example by administering an effective amount of an immunoresponsive cell comprising an antigen recognizing receptor that binds a selected antigen, wherein the binding activates the immunoresponsive cell, thereby treating or preventing the disease (such as a neoplasia, a pathogen infection, an autoimmune disorder, or an allogeneic transplant reaction). Dosing in CAR T cell therapies may for example involve administration of from 106 to 109 cells/kg, with or without a course of lymphodepletion, for example with cyclophosphamide.

[0988] In some embodiments, the treatment is administrated into patients undergoing an immunosuppressive treatment. The cells or population of cells can be made resistant to at least one immunosuppressive agent due to the inactivation of a gene encoding a receptor for such immunosuppressive agent. Not being bound by a theory, the immunosuppressive treatment should help the selection and expansion of the immunoresponsive or T cells according to the invention within the patient.

[0989] The administration of the cells or population of cells according to the present invention may be carried out in any convenient manner, including by aerosol inhalation, injection, ingestion, transfusion, implantation or transplantation. The cells or population of cells may be administered to a patient subcutaneously, intradermally, intratumorally, intranodally, intramedullary, intramuscularly, by intravenous or intralymphatic injection, or intraperitoneally. In one embodiment, the cell compositions of the present invention are preferably administered by intravenous injection.

[0990] The administration of the cells or population of cells can consist of the administration of 104-109 cells per kg body weight, preferably 105 to 106 cells/kg body weight including all integer values of cell numbers within those ranges. Dosing in CAR T cell therapies may for example involve administration of from 106 to 109 cells/kg, with or without a course of lymphodepletion, for example with cyclophosphamide. The cells or population of cells can be administrated in one or more doses. In another embodiment, the effective amount of cells are administrated as a single dose. In another embodiment, the effective amount of cells are administrated as more than one dose over a period time. Timing of administration is within the judgment of managing physician and depends on the clinical condition of the patient. The cells or population of cells may be obtained from any source, such as a blood bank or a donor. While individual needs vary, determination of optimal ranges of effective amounts of a given cell type for a particular disease or conditions are within the skill of one in the art. An effective amount means an amount which provides a therapeutic or prophylactic benefit. The dosage administrated will be dependent upon the age, health and weight of the recipient, kind of concurrent treatment, if any, frequency of treatment and the nature of the effect desired.

[0991] In another embodiment, the effective amount of cells or composition comprising those cells are administrated parenterally. The administration can be an intravenous administration. The administration can be directly done by injection within a tumor.

[0992] To guard against possible adverse reactions, engineered immunoresponsive cells may be equipped with a transgenic safety switch, in the form of a transgene that renders the cells vulnerable to exposure to a specific signal. For example, the herpes simplex viral thymidine kinase (TK) gene may be used in this way, for example by introduction into allogeneic T lymphocytes used as donor lymphocyte infusions following stem cell transplantation (Greco, et al., Improving the safety of cell therapy with the TK-suicide gene. Front. Pharmacol. 2015; 6: 95). In such cells, administration of a nucleoside prodrug such as ganciclovir or acyclovir causes cell death. Alternative safety switch constructs include inducible caspase 9, for example triggered by administration of a small-molecule dimerizer that brings together two nonfunctional icasp9 molecules to form the active enzyme. A wide variety of alternative approaches to implementing cellular proliferation controls have been described (see U.S. Patent Publication No. 20130071414; PCT Patent Publication WO2011146862; PCT Patent Publication WO2014011987; PCT Patent Publication WO2013040371; Zhou et al. BLOOD, 2014, 123/25:3895-3905; Di Stasi et al., The New England Journal of Medicine 2011; 365:1673-1683; Sadelain M, The New England Journal of Medicine 2011; 365:1735-173; Ramos et al., Stem Cells 28(6):1107-15 (2010)).

[0993] In a further refinement of adoptive therapies, genome editing with a CRISPR-Cas system as described herein may be used to tailor immunoresponsive cells to alternative implementations, for example providing edited CAR T cells (see Poirot et al., 2015, Multiplex genome edited T-cell manufacturing platform for “off-the-shelf” adoptive T-cell immunotherapies, Cancer Res 75 (18): 3853). For example, immunoresponsive cells may be edited to delete expression of some or all of the class of HLA type II and/or type I molecules, or to knockout selected genes that may inhibit the desired immune response, such as the PD1 gene.

[0994] Cells may be edited using any CRISPR system and method of use thereof as described herein. CRISPR systems may be delivered to an immune cell by any method described herein. In preferred embodiments, cells are edited ex vivo and transferred to a subject in need thereof. Immunoresponsive cells, CAR T cells or any cells used for adoptive cell transfer may be edited. Editing may be performed to eliminate potential alloreactive T-cell receptors (TCR), disrupt the target of a chemotherapeutic agent, block an immune checkpoint, activate a T cell, and/or increase the differentiation and/or proliferation of functionally exhausted or dysfunctional CD8+ T-cells (see PCT Patent Publications: WO2013176915, WO2014059173, WO2014172606, WO2014184744, and WO2014191128). Editing may result in inactivation of a gene.

[0995] T cell receptors (TCR) are cell surface receptors that participate in the activation of T cells in response to the presentation of antigen. The TCR is generally made from two chains, a and p, which assemble to form a heterodimer and associates with the CD3-transducing subunits to form the T cell receptor complex present on the cell surface. Each α and β chain of the TCR consists of an immunoglobulin-like N-terminal variable (V) and constant (C) region, a hydrophobic transmembrane domain, and a short cytoplasmic region. As for immunoglobulin molecules, the variable region of the α and β chains are generated by V(D)J recombination, creating a large diversity of antigen specificities within the population of T cells. However, in contrast to immunoglobulins that recognize intact antigen, T cells are activated by processed peptide fragments in association with an MHC molecule, introducing an extra dimension to antigen recognition by T cells, known as MHC restriction. Recognition of MHC disparities between the donor and recipient through the T cell receptor leads to T cell proliferation and the potential development of graft versus host disease (GVHD). The inactivation of TCRα or TCRβ can result in the elimination of the TCR from the surface of T cells preventing recognition of alloantigen and thus GVHD. However, TCR disruption generally results in the elimination of the CD3 signaling component and alters the means of further T cell expansion.

[0996] Allogeneic cells are rapidly rejected by the host immune system. It has been demonstrated that allogeneic leukocytes present in non-irradiated blood products will persist for no more than 5 to 6 days (Boni, Muranski et al. 2008 Blood 1; 112(12):4746-54). Thus, to prevent rejection of allogeneic cells, the host's immune system usually has to be suppressed to some extent. However, in the case of adoptive cell transfer the use of immunosuppressive drugs also have a detrimental effect on the introduced therapeutic T cells. Therefore, to effectively use an adoptive immunotherapy approach in these conditions, the introduced cells would need to be resistant to the immunosuppressive treatment. Thus, in a particular embodiment, the present invention further comprises a step of modifying T cells to make them resistant to an immunosuppressive agent, preferably by inactivating at least one gene encoding a target for an immunosuppressive agent. An immunosuppressive agent is an agent that suppresses immune function by one of several mechanisms of action. An immunosuppressive agent can be, but is not limited to a calcineurin inhibitor, a target of rapamycin, an interleukin-2 receptor α-chain blocker, an inhibitor of inosine monophosphate dehydrogenase, an inhibitor of dihydrofolic acid reductase, a corticosteroid or an immunosuppressive antimetabolite. The present invention allows conferring immunosuppressive resistance to T cells for immunotherapy by inactivating the target of the immunosuppressive agent in T cells. As non-limiting examples, targets for an immunosuppressive agent can be a receptor for an immunosuppressive agent such as: CD52, glucocorticoid receptor (GR), a FKBP family gene member and a cyclophilin family gene member.

[0997] Immune checkpoints are inhibitory pathways that slow down or stop immune reactions and prevent excessive tissue damage from uncontrolled activity of immune cells. In certain embodiments, the immune checkpoint targeted is the programmed death-1 (PD-1 or CD279) gene (PDCD1). In other embodiments, the immune checkpoint targeted is cytotoxic T-lymphocyte-associated antigen (CTLA-4). In additional embodiments, the immune checkpoint targeted is another member of the CD28 and CTLA4 Ig superfamily such as BTLA, LAG3, ICOS, PDL1 or KIR. In further additional embodiments, the immune checkpoint targeted is a member of the TNFR superfamily such as CD40, OX40, CD137, GITR, CD27 or TIM-3.

[0998] Additional immune checkpoints include Src homology 2 domain-containing protein tyrosine phosphatase 1 (SHP-1) (Watson H A, et al., SHP-1: the next checkpoint target for cancer immunotherapy? Biochem Soc Trans. 2016 Apr. 15; 44(2):356-62). SHP-1 is a widely expressed inhibitory protein tyrosine phosphatase (PTP). In T-cells, it is a negative regulator of antigen-dependent activation and proliferation. It is a cytosolic protein, and therefore not amenable to antibody-mediated therapies, but its role in activation and proliferation makes it an attractive target for genetic manipulation in adoptive transfer strategies, such as chimeric antigen receptor (CAR) T cells. Immune checkpoints may also include T cell immunoreceptor with Ig and ITIM domains (TIGIT/Vstm3/WUCAM/VSIG9) and VISTA (Le Mercier I, et al., (2015) Beyond CTLA-4 and PD-1, the generation Z of negative checkpoint regulators. Front. Immunol. 6:418).

[0999] International Patent Publication No. WO2014172606 relates to the use of MT1 and/or MT1 inhibitors to increase proliferation and/or activity of exhausted CD8+ T-cells and to decrease CD8+ T-cell exhaustion (e.g., decrease functionally exhausted or unresponsive CD8+ immune cells). In certain embodiments, metallothioneins are targeted by gene editing in adoptively transferred T cells.

[1000] In certain embodiments, targets of gene editing may be at least one targeted locus involved in the expression of an immune checkpoint protein. Such targets may include, but are not limited to CTLA4, PPP2CA, PPP2CB, PTPN6, PTPN22, PDCD1, ICOS (CD278), PDL1, KIR, LAG3, HAVCR2, BTLA, CD160, TIGIT, CD96, CRTAM, LAIR1, SIGLEC7, SIGLEC9, CD244 (2B4), TNFRSF10B, TNFRSF10A, CASP8, CASP10, CASP3, CASP6, CASP7, FADD, FAS, TGFBRII, TGFRBRI, SMAD2, SMAD3, SMAD4, SMAD10, SKI, SKIL, TGIF1, IL10RA, IL10RB, HMOX2, IL6R, IL6ST, EIF2AK4, CSK, PAG1, SIT1, FOXP3, PRDM1, BATF, VISTA, GUCY1A2, GUCY1A3, GUCY1B2, GUCY1B3, MT1, MT2, CD40, OX40, CD137, GITR, CD27, SHP-1 or TIM-3. In preferred embodiments, the gene locus involved in the expression of PD-1 or CTLA-4 genes is targeted. In other preferred embodiments, combinations of genes are targeted, such as but not limited to PD-1 and TIGIT.

[1001] In other embodiments, at least two genes are edited. Pairs of genes may include, but are not limited to PD1 and TCRα, PD1 and TCRβ, CTLA-4 and TCRα, CTLA-4 and TCRβ, LAG3 and TCRα, LAG3 and TCRβ, Tim3 and TCRα, Tim3 and TCRβ, BTLA and TCRα, BTLA and TCRβ, BY55 and TCRα, BY55 and TCRβ, TIGIT and TCRα, TIGIT and TCRβ, B7H5 and TCRα, B7H5 and TCRβ, LAIR1 and TCRα, LAIR1 and TCRβ, SIGLEC10 and TCRα, SIGLEC10 and TCRβ, 2B4 and TCRα, 2B4 and TCRβ.

[1002] Whether prior to or after genetic modification of the T cells, the T cells can be activated and expanded generally using methods as described, for example, in U.S. Pat. Nos. 6,352,694; 6,534,055; 6,905,680; 5,858,358; 6,887,466; 6,905,681; 7,144,575; 7,232,566; 7,175,843; 5,883,223; 6,905,874; 6,797,514; 6,867,041; and 7,572,631. T cells can be expanded in vitro or in vivo.

[1003] The practice of the present invention employs, unless otherwise indicated, conventional techniques of immunology, biochemistry, chemistry, molecular biology, microbiology, cell biology, genomics and recombinant DNA, which are within the skill of the art. See MOLECULAR CLONING: A LABORATORY MANUAL, 2nd edition (1989) (Sambrook, Fritsch and Maniatis); MOLECULAR CLONING: A LABORATORY MANUAL, 4th edition (2012) (Green and Sambrook); CURRENT PROTOCOLS IN MOLECULAR BIOLOGY (1987) (F. M. Ausubel, et al. eds.); the series METHODS IN ENZYMOLOGY (Academic Press, Inc.); PCR 2: A PRACTICAL APPROACH (1995) (M. J. MacPherson, B. D. Hames and G. R. Taylor eds.); ANTIBODIES, A LABORATORY MANUAL (1988) (Harlow and Lane, eds.); ANTIBODIES A LABORATORY MANUAL, 2nd edition (2013) (E. A. Greenfield ed.); and ANIMAL CELL CULTURE (1987) (R. I. Freshney, ed.).

[1004] The practice of the present invention employs, unless otherwise indicated, conventional techniques for generation of genetically modified mice. See Marten H. Hofker and Jan van Deursen, TRANSGENIC MOUSE METHODS AND PROTOCOLS, 2nd edition (2011).

[1005] In some embodiments, the invention described herein relates to a method for adoptive immunotherapy, in which T cells are edited ex vivo by CRISPR to modulate at least one gene and subsequently administered to a patient in need thereof. In some embodiments, the CRISPR editing comprising knocking-out or knocking-down the expression of a target gene in the edited T cells. In some embodiments, in addition to modulating the target gene, the T cells are also edited ex vivo by CRISPR to (1) knock-in an exogenous gene encoding a chimeric antigen receptor (CAR) or a T-cell receptor (TCR), (2) knock-out or knock-down expression of an immune checkpoint receptor, (3) knock-out or knock-down expression of an endogenous TCR, (4) knock-out or knock-down expression of a human leukocyte antigen class I (HLA-I) proteins, and/or (5) knock-out or knock-down expression of an endogenous gene encoding an antigen targeted by an exogenous CAR or TCR.

[1006] In some embodiments, the T cells are contacted ex vivo with an adeno-associated virus (AAV) vector encoding a CRISPR effector protein, and a guide molecule comprising a guide sequence hybridizable to a target sequence, a tracr mate sequence, and a tracr sequence hybridizable to the tracr mate sequence. In some embodiments, the T cells are contacted ex vivo (e.g., by electroporation) with a ribonucleoprotein (RNP) comprising a CRISPR effector protein complexed with a guide molecule, wherein the guide molecule comprising a guide sequence hybridizable to a target sequence, a tracr mate sequence, and a tracr sequence hybridizable to the tracr mate sequence. See Rupp et al., Scientific Reports 7:737 (2017); Liu et al., Cell Research 27:154-157 (2017). In some embodiments, the T cells are contacted ex vivo (e.g., by electroporation) with an mRNA encoding a CRISPR effector protein, and a guide molecule comprising a guide sequence hybridizable to a target sequence, a tracr mate sequence, and a tracr sequence hybridizable to the tracr mate sequence. See Eyquem et al., Nature 543:113-117 (2017). In some embodiments, the T cells are not contacted ex vivo with a lentivirus or retrovirus vector.

[1007] In some embodiments, the method comprises editing T cells ex vivo by CRISPR to knock-in an exogenous gene encoding a CAR, thereby allowing the edited T cells to recognize cancer cells based on the expression of specific proteins located on the cell surface. In some embodiments, T cells are edited ex vivo by CRISPR to knock-in an exogenous gene encoding a TCR, thereby allowing the edited T cells to recognize proteins derived from either the surface or inside of the cancer cells. In some embodiments, the method comprising providing an exogenous CAR-encoding or TCR-encoding sequence as a donor sequence, which can be integrated by homology-directed repair (HDR) into a genomic locus targeted by a CRISPR guide sequence. In some embodiments, targeting the exogenous CAR or TCR to an endogenous TCR α constant (TRAC) locus can reduce tonic CAR signaling and facilitate effective internalization and re-expression of the CAR following single or repeated exposure to antigen, thereby delaying effector T-cell differentiation and exhaustion. See Eyquem et al., Nature 543:113-117 (2017).

[1008] In some embodiments, the method comprises editing T cells ex vivo by CRISPR to block one or more immune checkpoint receptors to reduce immunosuppression by cancer cells. In some embodiments, T cells are edited ex vivo by CRISPR to knock-out or knock-down an endogenous gene involved in the programmed death-1 (PD-1) signaling pathway, such as PD-1 and PD-L1. In some embodiments, T cells are edited ex vivo by CRISPR to mutate the Pdcd1 locus or the CD274 locus. In some embodiments, T cells are edited ex vivo by CRISPR using one or more guide sequences targeting the first exon of PD-1. See Rupp et al., Scientific Reports 7:737 (2017); Liu et al., Cell Research 27:154-157 (2017).

[1009] In some embodiments, the method comprises editing T cells ex vivo by CRISPR to eliminate potential alloreactive TCRs to allow allogeneic adoptive transfer. In some embodiments, T cells are edited ex vivo by CRISPR to knock-out or knock-down an endogenous gene encoding a TCR (e.g., an αβ TCR) to avoid graft-versus-host-disease (GVHD). In some embodiments, T cells are edited ex vivo by CRISPR to mutate the TRAC locus. In some embodiments, T cells are edited ex vivo by CRISPR using one or more guide sequences targeting the first exon of TRAC. See Liu et al., Cell Research 27:154-157 (2017). In some embodiments, the method comprises use of CRISPR to knock-in an exogenous gene encoding a CAR or a TCR into the TRAC locus, while simultaneously knocking-out the endogenous TCR (e.g., with a donor sequence encoding a self-cleaving P2A peptide following the CAR cDNA). See Eyquem et al., Nature 543:113-117 (2017). In some embodiments, the exogenous gene comprises a promoter-less CAR-encoding or TCR-encoding sequence which is inserted operably downstream of an endogenous TCR promoter.

[1010] In some embodiments, the method comprises editing T cells ex vivo by CRISPR to knock-out or knock-down an endogenous gene encoding an HLA-I protein to minimize immunogenicity of the edited T cells. In some embodiments, T cells are edited ex vivo by CRISPR to mutate the beta-2 microglobulin (B2M) locus. In some embodiments, T cells are edited ex vivo by CRISPR using one or more guide sequences targeting the first exon of B2M. See Liu et al., Cell Research 27:154-157 (2017). In some embodiments, the method comprises use of CRISPR to knock-in an exogenous gene encoding a CAR or a TCR into the B2M locus, while simultaneously knocking-out the endogenous B2M (e.g., with a donor sequence encoding a self-cleaving P2A peptide following the CAR cDNA). See Eyquem et al., Nature 543:113-117 (2017). In some embodiments, the exogenous gene comprises a promoter-less CAR-encoding or TCR-encoding sequence which is inserted operably downstream of an endogenous B2M promoter.

[1011] In some embodiments, the method comprises editing T cells ex vivo by CRISPR to knock-out or knock-down an endogenous gene encoding an antigen targeted by an exogenous CAR or TCR. In some embodiments, the T cells are edited ex vivo by CRISPR to knock-out or knock-down the expression of a tumor antigen selected from human telomerase reverse transcriptase (hTERT), survivin, mouse double minute 2 homolog (MDM2), cytochrome P450 1B 1 (CYP1B), HER2/neu, Wilms' tumor gene 1 (WT1), livin, alphafetoprotein (AFP), carcinoembryonic antigen (CEA), mucin 16 (MUC16), MUC1, prostate-specific membrane antigen (PSMA), p53 or cyclin (DI) (see WO2016/011210). In some embodiments, the T cells are edited ex vivo by CRISPR to knock-out or knock-down the expression of an antigen selected from B cell maturation antigen (BCMA), transmembrane activator and CAML Interactor (TACI), or B-cell activating factor receptor (BAFF-R), CD38, CD138, CS-1, CD33, CD26, CD30, CD53, CD92, CD100, CD148, CD150, CD200, CD261, CD262, or CD362 (see WO2017/011804).

### Treating and Preventing Diseases Using RNA Editing

[1012] In some embodiments, the disease, disorder, and/condition or symptom thereof can be treated or prevented using an RNA editing system described herein. In some embodiments, the CRISPR-Cas system described herein is an RNA editing system. In some embodiments, treatment or prevention using a CRISPR-Cas RNA editing system described herein can have the advantage of less immunogenicity than a DNA editing CRISPR-Cas system and is not as hindered by limitations on viral vector packaging size. Further, as the effect is transient, the effect can be better controlled over time and can potentially be reversible. Thus, they pose less risk of causing permeant detrimental effects than DNA editing-based preventatives and treatments.

[1013] In some of these embodiments, the CRISPR-Cas system contains an ADAR enzyme or effector domain thereof. Such systems are described elsewhere herein. In some embodiments, the CRISPR-Cas system includes a Cas13 or Cas13d effector.

[1014] Any disease involving a dysfunctional RNA molecule, where the dysfunction is the result of a mutation in the RNA sequence can be treated or prevented by modifying its sequence using a CRISPR-Cas system capable of RNA modification described elsewhere herein. In some embodiments, the disease that can be treated or prevented using a CRISPR-Cas system capable of RNA modification can be one or more of those listed in Tables 11 and 12, one or more of those set forth in any of a disease identified as being caused or attributed to a mtDNA mutation set forth at mitomap.org, or a combination thereof. In some embodiments, the coding sequence for the gene involved in the disease is greater than the packaging capacity of a viral vector system, particularly an AAV vector system.

[1015] The potential for RNA editing has now been demonstrated in vitro and in vivo for pathogenic mutations in genes related to cystic fibrosis, Duchenne's muscular dystrophy, Hurler's syndrome, and Ornithine transcarbamylase (OTC) deficiency, among others. See e.g. Katrekar et al. Nat. Methods. 2019. 16:239-242; Montieel-Gonzalez et al. 2013. PNAS USA. 110: 18285-18290; Sinnamon et al. PNAS USA 2017; Wettengel et al. Curr. Gene Ther. 2018, 18:31-39; Qu et al. BioRxiv. 2019, 605972; and Fry et al. 2020. Int. J. Mol. Sci. 12:777, which are incorporated by reference as if expressed in their entirety here and the teachings of which can be adapted in view of the description herein to the CRISPR-Cas Systems described herein.

[1016] In some embodiments, the disease is an inherited retinal degeneration disease. In some embodiments, gene whose transcript can be modified using a CRISPR-Cas system described herein capable of RNA modification that is associated with inherited retinal degeneration and whose coding sequence is too large for packaging in a single AAV can be ABC4, USH2A, CEP290, MYO7A, EYS, and CDH23.

### Models of Diseases and Conditions

[1017] In some embodiments, a method of modeling a disease associated with a genomic locus in a eukaryotic organism or a non-human organism includes manipulation of a target sequence within a coding, non-coding or regulatory element of said genomic locus comprising delivering a non-naturally occurring or engineered composition comprising a viral vector system comprising one or more viral vectors operably encoding a composition for expression thereof, wherein the composition comprises particle delivery system or the delivery system or the virus particle of any one of the above embodiments or the cell of any one of the above embodiment.

[1018] In some embodiments, the invention provides a method of generating a model eukaryotic cell that can include one or more mutated disease genes and/or infectious microorganisms. In some embodiments, a disease gene is any gene associated an increase in the risk of having or developing a disease. In some embodiments, the method includes (a) introducing one or more vectors into a eukaryotic cell, wherein the one or more vectors comprise a CRISPR-Cas system and/or component thereof and/or a CRISPR-Cas vector or vector system that is capable of driving expression of a CRISPR-Cas system and/or component thereof including, but not limited to: a guide sequence optionally linked to a tracr mate sequence, a tracr sequence, one or more Cas effectors, and combinations thereof and (b) allowing a CRISPR-Cas complex to bind to one or more target polynucleotides, e.g., to effect cleavage, nicking, or other modification of the target polynucleotide within said disease gene, wherein the CRISPR-Cas complex is composed of one or more CRISPR-Cas effectors complexed with (1) one or more guide sequences that is/are hybridized to the target sequence(s) within the target polynucleotide(s), and optionally (2) the tracr mate sequence(s) that is/are hybridized to the tracr sequence(s), thereby generating a model eukaryotic cell comprising one or more mutated disease gene(s). Thus, in some embodiments the CRISPR-Cas system contains nucleic acid molecules for and drives expression of one or more of: a Cas effector, a guide sequence linked to a tracr mate sequence, and a tracr sequence and/or a Homologous Recombination template and/or a stabilizing ligand if the Cas effector has a destabilization domain. In some embodiments, said cleavage comprises cleaving one or two strands at the location of the target sequence by the Cas effector(s). In some embodiments, nicking comprises nicking one or two strands at the location of the target sequence by the Cas effector(s). In some embodiments, said cleavage or nicking results in modified transcription of a target polynucleotide. In some embodiments, modification results in decreased transcription of the target polynucleotide. In some embodiments, the method further comprises repairing said cleaved or nicked target polynucleotide by homologous recombination with an exogenous template polynucleotide, wherein said repair results in a mutation comprising an insertion, deletion, or substitution of one or more nucleotides of said target polynucleotide. In some embodiments, said mutation results in one or more amino acid changes in a protein expression from a gene comprising the target sequence.

[1019] The disease modeled can be any disease with a genetic or epigenetic component. In some embodiments, the disease modeled can be any as discussed elsewhere herein, including but not limited to any as set forth in Tables 11 and 12 herein or any as set forth in any one or more of a disease identified as being caused or attributed to a mtDNA mutation set forth at mitomap.org.

### In Situ Disease Detection

[1020] The CRISPR-Cas systems and/or components thereof can be used for diagnostic methods of detection such as in CASFISH (see e.g. Deng et al. 2015. PNAS USA 112(38): 11870-11875), CRISPR-Live FISH (see e.g. Wang et al. 2020. Science; 365(6459):1301-1305), sm-FISH (Lee and Jefcoate. 2017. Front. Endocrinol. doi.org/10.3389/fendo.2017.00289), sequential FISH CRISPRainbow (Ma et al. Nat Biotechnol, 34 (2016), pp. 528-530), CRISPR-Sirius (Nat Methods, 15 (2018), pp. 928-931), Casilio (Cheng et al. Cell Res, 26 (2016), pp. 254-257), Halo-Tag based genomic loci visualization techniques (e.g. Deng et al. 2015. PNAS USA 112(38): 11870-11875; Knight et al., Science, 350 (2015), pp. 823-826), RNA-aptamer based methods (e.g. Ma et al., J Cell Biol, 214 (2016), pp. 529-537), molecular beacon-based methods (e.g. Zhao et al. Biomaterials, 100 (2016), pp. 172-183; Wu et al. Nucleic Acids Res (2018)), Quantum Dot-based systems (e.g. Ma et al. Anal Chem, 89 (2017), pp. 12896-12901), multiplexed methods (e.g. Ma et al., Proc Natl Acad Sci USA, 112 (2015), pp. 3002-3007; Fu et al. Nat Commun, 7 (2016), p. 11707; Ma et al. Nat Biotechnol, 34 (2016), pp. 528-530; Shao et al. Nucleic Acids Res, 44 (2016), Article e86); Wang et al. Sci Rep, 6 (2016), p. 26857), 9, and other in situ CRISPR-hybridization based methods (e.g. Chen et al. Cell, 155 (2013), pp. 1479-1491; Gu et al. Science, 359 (2018), pp. 1050-1055; Tanebaum et al. Cell, 159 (2014), pp. 635-646; Ye et al. Protein Cell, 8 (2017), pp. 853-855; Chen et al. Nat Commun, 9 (2018), p. 5065; Shao et al. ACS Synth Biol (2017); Fu et al. Nat Commun, 7 (2016), p. 11707; Shao et al. Nucleic Acids Res, 44 (2016), Article e86; Wang et al., Sci Rep, 6 (2016), p. 26857), all of which are incorporated by reference herein as if expressed in their entirety and whose teachings can be adapted to the CRISPR-Cas systems and components thereof described herein in view of the description herein.

[1021] In some embodiments, the CRISPR-Cas system or component thereof can be used in a detection method, such as an in situ detection method described herein. In some embodiments, the CRISPR-Cas system or component thereof can include a catalytically inactivate Cas effector described herein, preferably an inactivated small Type II-D Cas (dsmall Type II-D Cas) and use this system in detection methods such as fluorescence in situ hybridization (FISH) or any other described herein. In some embodiments, the inactivated Cas effector, which lacks the ability to produce DNA double-strand breaks may be fused with a marker, such as fluorescent protein, such as the enhanced green fluorescent protein (eEGFP) and co-expressed with small guide RNAs to target pericentric, centric and telomeric repeats in vivo. The dCas effector or system thereof can be used to visualize both repetitive sequences and individual genes in the human genome. Such new applications of labelled dCas effector and CRISPR-Cas systems thereof can be important in imaging cells and studying the functional nuclear architecture, especially in cases with a small nucleus volume or complex 3-D structures.

### Cell Selection

[1022] In some embodiments, the CRISPR-Cas systems and/or components thereof described herein can be used in a method to screen and/or select cells. In some embodiments, CRISPR-Cas system-based screening/selection method can be used to identify diseased cells in a cell population. In some embodiments, selection of the cells results in a modification in the cells such that the selected cells die. In this way, diseased cells can be identified, and removed from the healthy cell population. In some embodiments, the diseased cells can be a cancer cell, pre-cancerous cell, a virus or other pathogenic organism infected cells, or otherwise abnormal cell. In some embodiments, the modification can impart another detectable change in the cells to be selected (e.g. a functional change and/or genomic barcode) that facilitates selection of the desired cells. In some embodiments a negative selection scheme can be used to obtain a desired cell population. In these embodiments, the cells to be selected against are modified, thus can be removed from the cell population based on their death or identification or sorting based the detectable change imparted on the cells. Thus, in these embodiments, the remaining cells after selection are the desired cell population.

[1023] In some embodiments, a method of selecting one or more cell(s) containing a polynucleotide modification can include: introducing one or more CRISPR-Cas system(s) and/or components thereof, and/or CRISPR-Cas vectors or vector systems into the cell(s), wherein the CRISPR-Cas system(s) and/or components thereof, and/or CRISPR-Cas vectors or vector systems contains and/or is capable of expressing one or more of: a Cas effector, a guide sequence optionally linked to a tracr mate sequence, a tracr sequence, and an editing template; wherein, for example that which is being expressed is within and expressed in vivo by the CRISPR-Cas system vector or vector system and/or the editing template comprises the one or more mutations that abolish Cas effector cleavage; allowing homologous recombination of the editing template with the target polynucleotide in the cell(s) to be selected; allowing a CRISPR complex to bind to a target polynucleotide to effect cleavage of the target polynucleotide within said gene, wherein the AAV-CRISPR complex comprises the Cas effector complexed with (1) the guide sequence that is hybridized to the target sequence within the target polynucleotide, and (2) the tracr mate sequence that is hybridized to the tracr sequence, wherein binding of the CRISPR complex to the target polynucleotide induces cell death or imparts some other detectable change to the cell, thereby allowing one or more cell(s) in which one or more mutations have been introduced to be selected. In a preferred embodiment, the Cas effector is a Cas 9 or Cas12. In some embodiments, the cell to be selected may be a eukaryotic cell. In some embodiments, the cell to be selected may be a prokaryotic cell. Selection of specific cells via the methods herein can be performed without requiring a selection marker or a two-step process that may include a counter-selection system.

### Therapeutic Agent Development

[1024] The CRISPR-Cas systems and components thereof described herein can be used to develop CRISPR-Cas-based and non-CRISPR-Cas-based biologically active agents, such as small molecule therapeutics. As used herein, “active agent” or “active ingredient” refers to a substance, compound, or molecule, which is biologically active or otherwise, induces a biological or physiological effect on a subject to which it is administered to. In other words, “active agent” or “active ingredient” refers to a component or components of a composition to which the whole or part of the effect of the composition is attributed. As used herein, “agent” refers to any substance, compound, molecule, and the like, which can be biologically active or otherwise can induce a biological and/or physiological effect on a subject to which it is administered to. An agent can be a primary active agent, or in other words, the component(s) of a composition to which the whole or part of the effect of the composition is attributed. An agent can be a secondary agent, or in other words, the component(s) of a composition to which an additional part and/or other effect of the composition is attributed. Thus, described herein are methods for developing a biologically active agent that modulates a cell function and/or signaling event associated with a disease and/or disease gene. In some embodiments, the method comprises (a) contacting a test compound with a diseased cell and/or a cell containing a disease gene cell; and (b) detecting a change in a readout that is indicative of a reduction or an augmentation of a cell signaling event or other cell functionality associated with said disease or disease gene, thereby developing said biologically active agent that modulates said cell signaling event or other functionality associated with said disease gene. In some embodiments, the diseased cell is a model cell described elsewhere herein. In some embodiments, the diseased cell is a diseased cell isolated from a subject in need of treatment. In some embodiments, the test compound is a small molecule agent. In some embodiments, test compound is a small molecule agent. In some embodiments, the test compound is a biologic molecule agent.

[1025] In some embodiments, the method involves developing a therapeutic based on the CRISPR-Cas system described herein. In particular embodiments, the therapeutic comprises a Cas effector and/or a guide RNA capable of hybridizing to a target sequence of interest. In particular embodiments, the therapeutic is a CRISPR-Cas vector or vector system that can contain a) a first regulatory element operably linked to a nucleotide sequence encoding the Cas effector protein(s); and b) a second regulatory element operably linked to one or more nucleotide sequences encoding one or more nucleic acid molecules comprising a guide RNA comprising a guide sequence, a direct repeat sequence; wherein components (a) and (b) are located on same or different vectors. In particular embodiments, the biologically active agent is a composition comprising a delivery system operably configured to deliver CRISPR-Cas system or components thereof, and/or or one or more polynucleotide sequences, vectors, or vector systems containing or encoding said components into a cell and capable of forming a CRISPR-Cas complex, and wherein said CRISPR-Cas complex is operable in the cell. In some embodiments, the CRISPR-Cas complex can include the Cas effector protein(s) as described herein, guide RNA comprising the guide sequence, and a direct repeat sequence. In any such compositions, the delivery system can be a yeast system, a lipofection system, a microinjection system, a biolistic system, virosomes, liposomes, immunoliposomes, polycations, lipid:nucleic acid conjugates or artificial virions, or any other system as described herein. In particular embodiments, the delivery is via a particle, a nanoparticle, a lipid or a cell penetrating peptide (CPP).

[1026] Also described herein are methods for developing or designing a CRISPR-Cas system, optionally a CRISPR-Cas system based therapy or therapeutic, comprising (a) selecting for a (therapeutic) locus of interest gRNA target sites, wherein said target sites have minimal sequence variation across a population, and from said selected target sites subselecting target sites, wherein a gRNA directed against said target sites recognizes a minimal number of off-target sites across said population, or (b) selecting for a (therapeutic) locus of interest gRNA target sites, wherein said target sites have minimal sequence variation across a population, or selecting for a (therapeutic) locus of interest gRNA target sites, wherein a gRNA directed against said target sites recognizes a minimal number of off-target sites across said population, and optionally estimating the number of (sub)selected target sites needed to treat or otherwise modulate or manipulate a population, and optionally validating one or more of the (sub)selected target sites for an individual subject, optionally designing one or more gRNA recognizing one or more of said (sub)selected target sites.

[1027] In some embodiments, the method for developing or designing a gRNA for use in a CRISPR-Cas system, optionally a CRISPR-Cas system based therapy or therapeutic, can include (a) selecting for a (therapeutic) locus of interest gRNA target sites, wherein said target sites have minimal sequence variation across a population, and from said selected target sites subselecting target sites, wherein a gRNA directed against said target sites recognizes a minimal number of off-target sites across said population, or (b) selecting for a (therapeutic) locus of interest gRNA target sites, wherein said target sites have minimal sequence variation across a population, or selecting for a (therapeutic) locus of interest gRNA target sites, wherein a gRNA directed against said target sites recognizes a minimal number of off-target sites across said population, and optionally estimating the number of (sub)selected target sites needed to treat or otherwise modulate or manipulate a population, optionally validating one or more of the (sub)selected target sites for an individual subject, optionally designing one or more gRNA recognizing one or more of said (sub)selected target sites.

[1028] In some embodiments, the method for developing or designing a CRISPR-Cas system, optionally a CRISPR-Cas system based therapy or therapeutic in a population, can include (a) selecting for a (therapeutic) locus of interest gRNA target sites, wherein said target sites have minimal sequence variation across a population, and from said selected target sites subselecting target sites, wherein a gRNA directed against said target sites recognizes a minimal number of off-target sites across said population, or (b) selecting for a (therapeutic) locus of interest gRNA target sites, wherein said target sites have minimal sequence variation across a population, or selecting for a (therapeutic) locus of interest gRNA target sites, wherein a gRNA directed against said target sites recognizes a minimal number of off-target sites across said population, and optionally estimating the number of (sub)selected target sites needed to treat or otherwise modulate or manipulate a population, optionally validating one or more of the (sub)selected target sites for an individual subject, optionally designing one or more gRNA recognizing one or more of said (sub)selected target sites.

[1029] In some embodiments the method for developing or designing a gRNA for use in a CRISPR-Cas system, optionally a CRISPR-Cas system based therapy or therapeutic in a population, can include (a) selecting for a (therapeutic) locus of interest gRNA target sites, wherein said target sites have minimal sequence variation across a population, and from said selected target sites subselecting target sites, wherein a gRNA directed against said target sites recognizes a minimal number of off-target sites across said population, or (b) selecting for a (therapeutic) locus of interest gRNA target sites, wherein said target sites have minimal sequence variation across a population, or selecting for a (therapeutic) locus of interest gRNA target sites, wherein a gRNA directed against said target sites recognizes a minimal number of off-target sites across said population, and optionally estimating the number of (sub)selected target sites needed to treat or otherwise modulate or manipulate a population, optionally validating one or more of the (sub)selected target sites for an individual subject, optionally designing one or more gRNA recognizing one or more of said (sub)selected target sites.

[1030] In some embodiments, the method for developing or designing a CRISPR-Cas system, such as a CRISPR-Cas system based therapy or therapeutic, optionally in a population; or for developing or designing a gRNA for use in a CRISPR-Cas system, optionally a CRISPR-Cas system based therapy or therapeutic, optionally in a population, can include: selecting a set of target sequences for one or more loci in a target population, wherein the target sequences do not contain variants occurring above a threshold allele frequency in the target population (i.e. platinum target sequences); removing from said selected (platinum) target sequences any target sequences having high frequency off-target candidates (relative to other (platinum) targets in the set) to define a final target sequence set; preparing one or more, such as a set of CRISPR-Cas systems based on the final target sequence set, optionally wherein a number of CRISP-Cas systems prepared is based (at least in part) on the size of a target population.

[1031] In certain embodiments, off-target candidates/off-targets, PAM restrictiveness, target cleavage efficiency, or effector protein specificity is identified or determined using a sequencing-based double-strand break (DSB) detection assay, such as described herein elsewhere. In certain embodiments, off-target candidates/off-targets are identified or determined using a sequencing-based double-strand break (DSB) detection assay, such as described herein elsewhere. In certain embodiments, off-targets, or off target candidates have at least 1, preferably 1-3, mismatches or (distal) PAM mismatches, such as 1 or more, such as 1, 2, 3, or more (distal) PAM mismatches. In certain embodiments, sequencing-based DSB detection assay comprises labeling a site of a DSB with an adapter comprising a primer binding site, labeling a site of a DSB with a barcode or unique molecular identifier, or combination thereof, as described herein elsewhere.

[1032] It will be understood that the guide sequence of the gRNA is 100% complementary to the target site, i.e. does not comprise any mismatch with the target site. It will be further understood that “recognition” of an (off-)target site by a gRNA presupposes CRISPR-Cas system functionality, i.e. an (off-)target site is only recognized by a gRNA if binding of the gRNA to the (off-)target site leads to CRISPR-Cas system activity (such as induction of single or double strand DNA cleavage, transcriptional modulation, etc.).

[1033] In certain embodiments, the target sites having minimal sequence variation across a population are characterized by absence of sequence variation in at least 99%, preferably at least 99.9%, more preferably at least 99.99% of the population. In certain embodiments, optimizing target location comprises selecting target sequences or loci having an absence of sequence variation in at least 99%, %, preferably at least 99.9%, more preferably at least 99.99% of a population. These targets are referred to herein elsewhere also as “platinum targets”. In certain embodiments, said population comprises at least 1000 individuals, such as at least 5000 individuals, such as at least 10000 individuals, such as at least 50000 individuals.

[1034] In certain embodiments, the off-target sites are characterized by at least one mismatch between the off-target site and the gRNA. In certain embodiments, the off-target sites are characterized by at most five, preferably at most four, more preferably at most three mismatches between the off-target site and the gRNA. In certain embodiments, the off-target sites are characterized by at least one mismatch between the off-target site and the gRNA and by at most five, preferably at most four, more preferably at most three mismatches between the off-target site and the gRNA.

[1035] In certain embodiments, said minimal number of off-target sites across said population is determined for high-frequency haplotypes in said population. In certain embodiments, said minimal number of off-target sites across said population is determined for high-frequency haplotypes of the off-target site locus in said population. In certain embodiments, said minimal number of off-target sites across said population is determined for high-frequency haplotypes of the target site locus in said population. In certain embodiments, the high-frequency haplotypes are characterized by occurrence in at least 0.1% of the population.

[1036] In certain embodiments, the number of (sub)selected target sites needed to treat a population is estimated based on based low frequency sequence variation, such as low frequency sequence variation captured in large scale sequencing datasets. In certain embodiments, the number of (sub)selected target sites needed to treat a population of a given size is estimated.

[1037] In certain embodiments, the method further comprises obtaining genome sequencing data of a subject to be treated; and treating the subject with a CRISPR-Cas system selected from the set of CRISPR-Cas systems, wherein the CRISPR-Cas system selected is based (at least in part) on the genome sequencing data of the individual. In certain embodiments, the ((sub)selected) target is validated by genome sequencing, preferably whole genome sequencing.

[1038] In certain embodiments, target sequences or loci as described herein are (further) selected based on optimization of one or more parameters, such as PAM type (natural or modified), PAM nucleotide content, PAM length, target sequence length, PAM restrictiveness, target cleavage efficiency, and target sequence position within a gene, a locus or other genomic region. Methods of optimization are discussed in greater detail elsewhere herein.

[1039] In certain embodiments, target sequences or loci as described herein are (further) selected based on optimization of one or more of target loci location, target length, target specificity, and PAM characteristics. As used herein, PAM characteristics may comprise for instance PAM sequence, PAM length, and/or PAM GC contents. In certain embodiments, optimizing PAM characteristics comprises optimizing nucleotide content of a PAM. In certain embodiments, optimizing nucleotide content of PAM is selecting a PAM with a motif that maximizes abundance in the one or more target loci, minimizes mutation frequency, or both. Minimizing mutation frequency can for instance be achieved by selecting PAM sequences devoid of or having low or minimal CpG.

[1040] In certain embodiments, the effector protein for each CRISPR-Cas system in the set of CRISPR-Cas systems is selected based on optimization of one or more parameters selected from the group consisting of, effector protein size, ability of effector protein to access regions of high chromatin accessibility, degree of uniform enzyme activity across genomic targets, epigenetic tolerance, mismatch/budge tolerance, effector protein specificity, effector protein stability or half-life, effector protein immunogenicity or toxicity. Methods of optimization are discussed in greater detail elsewhere herein.

### Gene Drives

[1041] In some embodiments, the small Type II-D Cas CRISPR-Cas systems described herein can be used to provide RNA-guided gene drives, for example in systems analogous to gene drives described in PCT Patent Publication WO 2015/105928. Systems of this kind may for example provide methods for altering eukaryotic germline cells, by introducing into the germline cell a nucleic acid sequence encoding an RNA-guided DNA nuclease and one or more guide RNAs. The guide RNAs may be designed to be complementary to one or more target locations on genomic DNA of the germline cell. The nucleic acid sequence encoding the RNA guided DNA nuclease and the nucleic acid sequence encoding the guide RNAs may be provided on constructs between flanking sequences, with promoters arranged such that the germline cell may express the RNA guided DNA nuclease and the guide RNAs, together with any desired cargo-encoding sequences that are also situated between the flanking sequences. The flanking sequences will typically include a sequence which is identical to a corresponding sequence on a selected target chromosome, so that the flanking sequences work with the components encoded by the construct to facilitate insertion of the foreign nucleic acid construct sequences into genomic DNA at a target cut site by mechanisms such as homologous recombination, to render the germline cell homozygous for the foreign nucleic acid sequence. In this way, gene-drive systems are capable of introgressing desired cargo genes throughout a breeding population (Gantz et al., 2015, Highly efficient Cas9-mediated gene drive for population modification of the malaria vector mosquito Anopheles stephensi, PNAS 2015, published ahead of print Nov. 23, 2015, doi:10.1073/pnas.1521077112; Esvelt et al., 2014, Concerning RNA-guided gene drives for the alteration of wild populations eLife 2014; 3:e03401). In select embodiments, target sequences may be selected which have few potential off-target sites in a genome. Targeting multiple sites within a target locus, using multiple guide RNAs, may increase the cutting frequency and hinder the evolution of drive resistant alleles. Truncated guide RNAs may reduce off-target cutting. Paired nickases may be used instead of a single nuclease, to further increase specificity. Gene drive constructs may include cargo sequences encoding transcriptional regulators, for example to activate homologous recombination genes and/or repress non-homologous end-joining. Target sites may be chosen within an essential gene, so that non-homologous end-joining events may cause lethality rather than creating a drive-resistant allele. The gene drive constructs can be engineered to function in a range of hosts at a range of temperatures (Cho et al. 2013, Rapid and Tunable Control of Protein Stability in Caenorhabditis elegans Using a Small Molecule, PLoS ONE 8(8): e72393. doi:10.1371/journal.pone.0072393). These approaches can be adapted for use with the small Type II-D Cas proteins and systems thereof described herein.

### Xenotransplantation

[1042] In some embodiments, the small Type II-D CRISPR-Cas systems described herein can be used to provide RNA-guided DNA nucleases adapted to be used to provide modified tissues for transplantation. For example, RNA-guided DNA nucleases may be used to knockout, knockdown or disrupt selected genes in an animal, such as a transgenic pig (such as the human heme oxygenase-1 transgenic pig line), for example by disrupting expression of genes that encode epitopes recognized by the human immune system, i.e. xenoantigen genes. Candidate porcine genes for disruption may for example include α(1,3)-galactosyltransferase and cytidine monophosphate-N-acetylneuraminic acid hydroxylase genes (see PCT Patent Publication WO 2014/066505). In addition, genes encoding endogenous retroviruses may be disrupted, for example the genes encoding all porcine endogenous retroviruses (see Yang et al., 2015, Genome-wide inactivation of porcine endogenous retroviruses (PERVs), Science 27 Nov. 2015: Vol. 350 no. 6264 pp. 1101-1104). In addition, RNA-guided DNA nucleases may be used to target a site for integration of additional genes in xenotransplant donor animals, such as a human CD55 gene to improve protection against hyperacute rejection.

### Optimization of CRISPR-Cas Systems

[1043] The methods of the present invention can involve optimization of selected parameters or variables associated with the CRISPR-Cas system and/or its functionality, as described herein further elsewhere. Optimization of the CRISPR-Cas system in the methods as described herein may depend on the target(s), such as the therapeutic target or therapeutic targets, the mode or type of CRISPR-Cas system modulation, such as CRISPR-Cas system based therapeutic target(s) modulation, modification, or manipulation, as well as the delivery of the CRISPR-Cas system components. One or more targets may be selected, depending on the genotypic and/or phenotypic outcome. For instance, one or more therapeutic targets may be selected, depending on (genetic) disease etiology or the desired therapeutic outcome. The (therapeutic) target(s) may be a single gene, locus, or other genomic site, or may be multiple genes, loci or other genomic sites. As is known in the art, a single gene, locus, or other genomic site may be targeted more than once, such as by use of multiple gRNAs.

[1044] CRISPR-Cas system activity, such as CRISPR-Cas system-based therapy or therapeutics may involve target disruption, such as target mutation, such as leading to gene knockout. CRISPR-Cas system activity, such as CRISPR-Cas system-based therapy or therapeutics may involve replacement of particular target sites, such as leading to target correction. CRISPR-Cas system-based therapy or therapeutics may involve removal of particular target sites, such as leading to target deletion. CRISPR-Cas system activity, such as CRISPR-Cas system-based therapy or therapeutics may involve modulation of target site functionality, such as target site activity or accessibility, leading for instance to (transcriptional and/or epigenetic) gene or genomic region activation or gene or genomic region silencing. The skilled person will understand that modulation of target site functionality may involve CRISPR effector mutation (such as for instance generation of a catalytically inactive CRISPR effector) and/or functionalization (such as for instance fusion of the CRISPR effector with a heterologous functional domain, such as a transcriptional activator or repressor), as described herein elsewhere.

[1045] Accordingly, in some embodiments, the invention relates to a method as described herein, comprising selection of one or more (therapeutic) target, selecting one or more CRISPR-Cas system functionality, and optimization of selected parameters or variables associated with the CRISPR-Cas system and/or its functionality. In a related embodiment, the invention relates to a method as described herein, comprising (a) selecting one or more (therapeutic) target loci, (b) selecting one or more CRISPR-Cas system functionalities, (c) optionally selecting one or more modes of delivery, and preparing, developing, or designing a CRISPR-Cas system selected based on steps (a)-(c).

[1046] In certain embodiments, CRISPR-Cas system functionality comprises genomic mutation. In certain embodiments, CRISPR-Cas system functionality comprises single genomic mutation. In certain embodiments, CRISPR-Cas system functionality comprises multiple genomic mutation. In certain embodiments, CRISPR-Cas system functionality comprises gene knockout. In certain embodiments, CRISPR-Cas system functionality comprises single gene knockout. In certain embodiments, CRISPR-Cas system functionality comprises multiple gene knockout. In certain embodiments, CRISPR-Cas system functionality comprises gene correction. In certain embodiments, CRISPR-Cas system functionality comprises single gene correction. In certain embodiments, CRISPR-Cas system functionality comprises multiple gene correction. In certain embodiments, CRISPR-Cas system functionality comprises genomic region correction. In certain embodiments, CRISPR-Cas system functionality comprises single genomic region correction. In certain embodiments, CRISPR-Cas system functionality comprises multiple genomic region correction. In certain embodiments, CRISPR-Cas system functionality comprises gene deletion. In certain embodiments, CRISPR-Cas system functionality comprises single gene deletion. In certain embodiments, CRISPR-Cas system functionality comprises multiple gene deletion. In certain embodiments, CRISPR-Cas system functionality comprises genomic region deletion. In certain embodiments, CRISPR-Cas system functionality comprises single genomic region deletion. In certain embodiments, CRISPR-Cas system functionality comprises multiple genomic region deletion. In certain embodiments, CRISPR-Cas system functionality comprises modulation of gene or genomic region functionality. In certain embodiments, CRISPR-Cas system functionality comprises modulation of single gene or genomic region functionality. In certain embodiments, CRISPR-Cas system functionality comprises modulation of multiple gene or genomic region functionality. In certain embodiments, CRISPR-Cas system functionality comprises gene or genomic region functionality, such as gene or genomic region activity. In certain embodiments, CRISPR-Cas system functionality comprises single gene or genomic region functionality, such as gene or genomic region activity. In certain embodiments, CRISPR-Cas system functionality comprises multiple gene or genomic region functionality, such as gene or genomic region activity. In certain embodiments, CRISPR-Cas system functionality comprises modulation gene activity or accessibility optionally leading to transcriptional and/or epigenetic gene or genomic region activation or gene or genomic region silencing. In certain embodiments, CRISPR-Cas system functionality comprises modulation single gene activity or accessibility optionally leading to transcriptional and/or epigenetic gene or genomic region activation or gene or genomic region silencing. In certain embodiments, CRISPR-Cas system functionality comprises modulation multiple gene activity or accessibility optionally leading to transcriptional and/or epigenetic gene or genomic region activation or gene or genomic region silencing.

[1047] Optimization of selected parameters or variables in the methods as described herein may result in optimized or improved CRISPR-Cas system, such as CRISPR-Cas system-based therapy or therapeutic, specificity, efficacy, and/or safety. In certain embodiments, one or more of the following parameters or variables are taken into account, are selected, or are optimized in the methods of the invention as described herein: Cas protein allosteric interactions, Cas protein functional domains and functional domain interactions, CRISPR effector specificity, gRNA specificity, CRISPR-Cas complex specificity, PAM restrictiveness, PAM type (natural or modified), PAM nucleotide content, PAM length, CRISPR effector activity, gRNA activity, CRISPR-Cas complex activity, target cleavage efficiency, target site selection, target sequence length, ability of effector protein to access regions of high chromatin accessibility, degree of uniform enzyme activity across genomic targets, epigenetic tolerance, mismatch/budge tolerance, CRISPR effector stability, CRISPR effector mRNA stability, gRNA stability, CRISPR-Cas complex stability, CRISPR effector protein or mRNA immunogenicity or toxicity, gRNA immunogenicity or toxicity, CRISPR-Cas complex immunogenicity or toxicity, CRISPR effector protein or mRNA dose or titer, gRNA dose or titer, CRISPR-Cas complex dose or titer, CRISPR effector protein size, CRISPR effector expression level, gRNA expression level, CRISPR-Cas complex expression level, CRISPR effector spatiotemporal expression, gRNA spatiotemporal expression, CRISPR-Cas complex spatiotemporal expression.

[1048] By means of example, and without limitation, parameter or variable optimization may be achieved as follows. CRISPR effector specificity may be optimized by selecting the most specific CRISPR effector. This may be achieved for instance by selecting the most specific CRISPR effector orthologue or by specific CRISPR effector mutations which increase specificity. gRNA specificity may be optimized by selecting the most specific gRNA. This can be achieved for instance by selecting gRNA having low homology, i.e. at least one or preferably more, such as at least 2, or preferably at least 3, mismatches to off-target sites. CRISPR-Cas complex specificity may be optimized by increasing CRISPR effector specificity and/or gRNA specificity as above. PAM restrictiveness may be optimized by selecting a CRISPR effector having to most restrictive PAM recognition. This can be achieved for instance by selecting a CRISPR effector orthologue having more restrictive PAM recognition or by specific CRISPR effector mutations which increase or alter PAM restrictiveness. PAM type may be optimized for instance by selecting the appropriate CRISPR effector, such as the appropriate CRISPR effector recognizing a desired PAM type. The CRISPR effector or PAM type may be naturally occurring or may for instance be optimized based on CRISPR effector mutants having an altered PAM recognition, or PAM recognition repertoire. PAM nucleotide content may for instance be optimized by selecting the appropriate CRISPR effector, such as the appropriate CRISPR effector recognizing a desired PAM nucleotide content. The CRISPR effector or PAM type may be naturally occurring or may for instance be optimized based on CRISPR effector mutants having an altered PAM recognition, or PAM recognition repertoire. PAM length may for instance be optimized by selecting the appropriate CRISPR effector, such as the appropriate CRISPR effector recognizing a desired PAM nucleotide length. The CRISPR effector or PAM type may be naturally occurring or may for instance be optimized based on CRISPR effector mutants having an altered PAM recognition, or PAM recognition repertoire.

[1049] Target length or target sequence length may for instance be optimized by selecting the appropriate CRISPR effector, such as the appropriate CRISPR effector recognizing a desired target or target sequence nucleotide length. Alternatively, or in addition, the target (sequence) length may be optimized by providing a target having a length deviating from the target (sequence) length typically associated with the CRISPR effector, such as the naturally occurring CRISPR effector. The CRISPR effector or target (sequence) length may be naturally occurring or may for instance be optimized based on CRISPR effector mutants having an altered target (sequence) length recognition, or target (sequence) length recognition repertoire. For instance, increasing or decreasing target (sequence) length may influence target recognition and/or off-target recognition. CRISPR effector activity may be optimized by selecting the most active CRISPR effector. This may be achieved for instance by selecting the most active CRISPR effector orthologue or by specific CRISPR effector mutations which increase activity. The ability of the CRISPR effector protein to access regions of high chromatin accessibility, may be optimized by selecting the appropriate CRISPR effector or mutant thereof, and can consider the size of the CRISPR effector, charge, or other dimensional variables etc. The degree of uniform CRISPR effector activity may be optimized by selecting the appropriate CRISPR effector or mutant thereof, and can consider CRISPR effector specificity and/or activity, PAM specificity, target length, mismatch tolerance, epigenetic tolerance, CRISPR effector and/or gRNA stability and/or half-life, CRISPR effector and/or gRNA immunogenicity and/or toxicity, etc. gRNA activity may be optimized by selecting the most active gRNA. In some embodiments, this can be achieved by increasing gRNA stability through RNA modification. CRISPR-Cas complex activity may be optimized by increasing CRISPR effector activity and/or gRNA activity as above.

[1050] The target site selection may be optimized by selecting the optimal position of the target site within a gene, locus or other genomic region. The target site selection may be optimized by optimizing target location comprises selecting a target sequence with a gene, locus, or other genomic region having low variability. This may be achieved for instance by selecting a target site in an early and/or conserved exon or domain (i.e. having low variability, such as polymorphisms, within a population).

[1051] In certain embodiments, optimizing target (sequence) length comprises selecting a target sequence within one or more target loci between 5 and 25 nucleotides. In certain embodiments, a target sequence is 20 nucleotides.

[1052] In certain embodiments, optimizing target specificity comprises selecting targets loci that minimize off-target candidates.

[1053] In some embodiments, the target site may be selected by minimization of off-target effects (e.g. off-targets qualified as having 1-5, 1-4, or preferably 1-3 mismatches compared to target and/or having one or more PAM mismatches, such as distal PAM mismatches), preferably also considering variability within a population. CRISPR effector stability may be optimized by selecting CRISPR effector having appropriate half-life, such as preferably a short half-life while still capable of maintaining sufficient activity. In some embodiments, this can be achieved by selecting an appropriate CRISPR effector orthologue having a specific half-life or by specific CRISPR effector mutations or modifications which affect half-life or stability, such as inclusion (e.g. fusion) of stabilizing or destabilizing domains or sequences. CRISPR effector mRNA stability may be optimized by increasing or decreasing CRISPR effector mRNA stability. In some embodiments, this can be achieved by increasing or decreasing CRISPR effector mRNA stability through mRNA modification. gRNA stability may be optimized by increasing or decreasing gRNA stability. In some embodiments, this can be achieved by increasing or decreasing gRNA stability through RNA modification. CRISPR-Cas complex stability may be optimized by increasing or decreasing CRISPR effector stability and/or gRNA stability as above. CRISPR effector protein or mRNA immunogenicity or toxicity may be optimized by decreasing CRISPR effector protein or mRNA immunogenicity or toxicity. In some embodiments, this can be achieved by mRNA or protein modifications. Similarly, in case of DNA based expression systems, DNA immunogenicity or toxicity may be decreased. gRNA immunogenicity or toxicity may be optimized by decreasing gRNA immunogenicity or toxicity. In some embodiments, this can be achieved by gRNA modifications. Similarly, in case of DNA based expression systems, DNA immunogenicity or toxicity may be decreased. CRISPR-Cas complex immunogenicity or toxicity may be optimized by decreasing CRISPR effector immunogenicity or toxicity and/or gRNA immunogenicity or toxicity as above, or by selecting the least immunogenic or toxic CRISPR effector/gRNA combination. Similarly, in case of DNA based expression systems, DNA immunogenicity or toxicity may be decreased. CRISPR effector protein or mRNA dose or titer may be optimized by selecting dosage or titer to minimize toxicity and/or maximize specificity and/or efficacy. gRNA dose or titer may be optimized by selecting dosage or titer to minimize toxicity and/or maximize specificity and/or efficacy. CRISPR-Cas complex dose or titer may be optimized by selecting dosage or titer to minimize toxicity and/or maximize specificity and/or efficacy. CRISPR effector protein size may be optimized by selecting minimal protein size to increase efficiency of delivery, in particular for virus mediated delivery. CRISPR effector, gRNA, or CRISPR-Cas complex expression level may be optimized by limiting (or extending) the duration of expression and/or limiting (or increasing) expression level. This may be achieved for instance by using self-inactivating CRISPR-Cas systems, such as including a self-targeting (e.g. CRISPR effector targeting) gRNA, by using viral vectors having limited expression duration, by using appropriate promoters for low (or high) expression levels, by combining different delivery methods for individual CRISP-Cas system components, such as virus mediated delivery of CRISPR-effector encoding nucleic acid combined with non-virus mediated delivery of gRNA, or virus mediated delivery of gRNA combined with non-virus mediated delivery of CRISPR effector protein or mRNA. CRISPR effector, gRNA, or CRISPR-Cas complex spatiotemporal expression may be optimized by appropriate choice of conditional and/or inducible expression systems, including controllable CRISPR effector activity optionally a destabilized CRISPR effector and/or a split CRISPR effector, and/or cell- or tissue-specific expression systems.

[1054] In some embodiments, the invention relates to a method as described herein, comprising selection of one or more (therapeutic) target, selecting CRISPR-Cas system functionality, selecting CRISPR-Cas system mode of delivery, selecting CRISPR-Cas system delivery vehicle or expression system, and optimization of selected parameters or variables associated with the CRISPR-Cas system and/or its functionality, optionally wherein the parameters or variables are one or more selected from CRISPR effector specificity, gRNA specificity, CRISPR-Cas complex specificity, PAM restrictiveness, PAM type (natural or modified), PAM nucleotide content, PAM length, CRISPR effector activity, gRNA activity, CRISPR-Cas complex activity, target cleavage efficiency, target site selection, target sequence length, ability of effector protein to access regions of high chromatin accessibility, degree of uniform enzyme activity across genomic targets, epigenetic tolerance, mismatch/budge tolerance, CRISPR effector stability, CRISPR effector mRNA stability, gRNA stability, CRISPR-Cas complex stability, CRISPR effector protein or mRNA immunogenicity or toxicity, gRNA immunogenicity or toxicity, CRISPR-Cas complex immunogenicity or toxicity, CRISPR effector protein or mRNA dose or titer, gRNA dose or titer, CRISPR-Cas complex dose or titer, CRISPR effector protein size, CRISPR effector expression level, gRNA expression level, CRISPR-Cas complex expression level, CRISPR effector spatiotemporal expression, gRNA spatiotemporal expression, CRISPR-Cas complex spatiotemporal expression.

[1055] In some embodiments, the invention relates to a method as described herein, comprising selecting one or more (therapeutic) target, selecting one or more CRISPR-Cas system functionality, selecting one or more CRISPR-Cas system mode of delivery, selecting one or more CRISPR-Cas system delivery vehicle or expression system, and optimization of selected parameters or variables associated with the CRISPR-Cas system and/or its functionality, wherein specificity, efficacy, and/or safety are optimized, and optionally wherein optimization of specificity comprises optimizing one or more parameters or variables selected from CRISPR effector specificity, gRNA specificity, CRISPR-Cas complex specificity, PAM restrictiveness, PAM type (natural or modified), PAM nucleotide content, PAM length, wherein optimization of efficacy comprises optimizing one or more parameters or variables selected from CRISPR effector activity, gRNA activity, CRISPR-Cas complex activity, target cleavage efficiency, target site selection, target sequence length, CRISPR effector protein size, ability of effector protein to access regions of high chromatin accessibility, degree of uniform enzyme activity across genomic targets, epigenetic tolerance, mismatch/budge tolerance, and wherein optimization of safety comprises optimizing one or more parameters or variables selected from CRISPR effector stability, CRISPR effector mRNA stability, gRNA stability, CRISPR-Cas complex stability, CRISPR effector protein or mRNA immunogenicity or toxicity, gRNA immunogenicity or toxicity, CRISPR-Cas complex immunogenicity or toxicity, CRISPR effector protein or mRNA dose or titer, gRNA dose or titer, CRISPR-Cas complex dose or titer, CRISPR effector expression level, gRNA expression level, CRISPR-Cas complex expression level, CRISPR effector spatiotemporal expression, gRNA spatiotemporal expression, CRISPR-Cas complex spatiotemporal expression.

[1056] In some embodiments, the invention relates to a method as described herein, comprising optionally selecting one or more (therapeutic) target, optionally selecting one or more CRISPR-Cas system functionality, optionally selecting one or more CRISPR-Cas system mode of delivery, optionally selecting one or more CRISPR-Cas system delivery vehicle or expression system, and optimization of selected parameters or variables associated with the CRISPR-Cas system and/or its functionality, wherein specificity, efficacy, and/or safety are optimized, and optionally wherein optimization of specificity comprises optimizing one or more parameters or variables selected from CRISPR effector specificity, gRNA specificity, CRISPR-Cas complex specificity, PAM restrictiveness, PAM type (natural or modified), PAM nucleotide content, PAM length, wherein optimization of efficacy comprises optimizing one or more parameters or variables selected from CRISPR effector activity, gRNA activity, CRISPR-Cas complex activity, target cleavage efficiency, target site selection, target sequence length, CRISPR effector protein size, ability of effector protein to access regions of high chromatin accessibility, degree of uniform enzyme activity across genomic targets, epigenetic tolerance, mismatch/budge tolerance, and wherein optimization of safety comprises optimizing one or more parameters or variables selected from CRISPR effector stability, CRISPR effector mRNA stability, gRNA stability, CRISPR-Cas complex stability, CRISPR effector protein or mRNA immunogenicity or toxicity, gRNA immunogenicity or toxicity, CRISPR-Cas complex immunogenicity or toxicity, CRISPR effector protein or mRNA dose or titer, gRNA dose or titer, CRISPR-Cas complex dose or titer, CRISPR effector expression level, gRNA expression level, CRISPR-Cas complex expression level, CRISPR effector spatiotemporal expression, gRNA spatiotemporal expression, CRISPR-Cas complex spatiotemporal expression.

[1057] In some embodiments, the invention relates to a method as described herein, comprising optimization of selected parameters or variables associated with the CRISPR-Cas system and/or its functionality, wherein specificity, efficacy, and/or safety are optimized, and optionally wherein optimization of specificity comprises optimizing one or more parameters or variables selected from CRISPR effector specificity, gRNA specificity, CRISPR-Cas complex specificity, PAM restrictiveness, PAM type (natural or modified), PAM nucleotide content, PAM length, wherein optimization of efficacy comprises optimizing one or more parameters or variables selected from CRISPR effector activity, gRNA activity, CRISPR-Cas complex activity, target cleavage efficiency, target site selection, target sequence length, CRISPR effector protein size, ability of effector protein to access regions of high chromatin accessibility, degree of uniform enzyme activity across genomic targets, epigenetic tolerance, mismatch/budge tolerance, and wherein optimization of safety comprises optimizing one or more parameters or variables selected from CRISPR effector stability, CRISPR effector mRNA stability, gRNA stability, CRISPR-Cas complex stability, CRISPR effector protein or mRNA immunogenicity or toxicity, gRNA immunogenicity or toxicity, CRISPR-Cas complex immunogenicity or toxicity, CRISPR effector protein or mRNA dose or titer, gRNA dose or titer, CRISPR-Cas complex dose or titer, CRISPR effector expression level, gRNA expression level, CRISPR-Cas complex expression level, CRISPR effector spatiotemporal expression, gRNA spatiotemporal expression, CRISPR-Cas complex spatiotemporal expression.

[1058] It will be understood that the parameters or variables to be optimized as well as the nature of optimization may depend on the (therapeutic) target, the CRISPR-Cas system functionality, the CRISPR-Cas system mode of delivery, and/or the CRISPR-Cas system delivery vehicle or expression system.

[1059] In some embodiments, the invention relates to a method as described herein, comprising optimization of gRNA specificity at the population level. Preferably, said optimization of gRNA specificity comprises minimizing gRNA target site sequence variation across a population and/or minimizing gRNA off-target incidence across a population.

[1060] In some embodiments, optimization can result in selection of a CRISPR-Cas effector that is naturally occurring or is modified. In some embodiments, optimization can result in selection of a CRISPR-Cas effector that has nuclease, nickase, deaminase, transposase, and/or has one or more effector functionalities deactivated or eliminated. In some embodiments, optimizing a PAM specificity can include selecting a CRISPR-Cas effector with a modified PAM specificity. In some embodiments, optimizing can include selecting a CRISPR-Cas effector having a minimal size. In certain embodiments, optimizing effector protein stability comprises selecting an effector protein having a short half-life while maintaining sufficient activity, such as by selecting an appropriate CRISPR effector orthologue having a specific half-life or stability. In certain embodiments, optimizing immunogenicity or toxicity comprises minimizing effector protein immunogenicity or toxicity by protein modifications. In certain embodiments, optimizing functional specific comprises selecting a protein effector with reduced tolerance of mismatches and/or bulges between the guide RNA and one or more target loci.

[1061] In certain embodiments, optimizing efficacy comprises optimizing overall efficiency, epigenetic tolerance, or both. In certain embodiments, maximizing overall efficiency comprises selecting an effector protein with uniform enzyme activity across target loci with varying chromatin complexity, selecting an effector protein with enzyme activity limited to areas of open chromatin accessibility. In certain embodiments, chromatin accessibility is measured using one or more of ATAC-seq, or a DNA-proximity ligation assay. In certain embodiments, optimizing epigenetic tolerance comprises optimizing methylation tolerance, epigenetic mark competition, or both. In certain embodiments, optimizing methylation tolerance comprises selecting an effector protein that modify methylated DNA. In certain embodiments, optimizing epigenetic tolerance comprises selecting an effector protein unable to modify silenced regions of a chromosome, selecting an effector protein able to modify silenced regions of a chromosome, or selecting target loci not enriched for epigenetic markers

[1062] In certain embodiments, selecting an optimized guide RNA comprises optimizing gRNA stability, gRNA immunogenicity, or both, or other gRNA associated parameters or variables as described herein elsewhere.

[1063] In certain embodiments, optimizing gRNA stability and/or gRNA immunogenicity comprises RNA modification, or other gRNA associated parameters or variables as described herein elsewhere. In certain embodiments, the modification comprises removing 1-3 nucleotides form the 3′ end of a target complementarity region of the gRNA. In certain embodiments, modification comprises an extended gRNA and/or trans RNA/DNA element that create stable structures in the gRNA that compete with gRNA base pairing at a target of off-target loci, or extended complimentary nucleotides between the gRNA and target sequence, or both.

[1064] In certain embodiments, the mode of delivery comprises delivering gRNA and/or CRISPR effector protein, delivering gRNA and/or CRISPR effector mRNA, or delivery gRNA and/or CRISPR effector as a DNA based expression system. In certain embodiments, the mode of delivery further comprises selecting a delivery vehicle and/or expression systems from the group consisting of liposomes, lipid particles, nanoparticles, biolistics, or viral-based expression/delivery systems. In certain embodiments, expression is spatiotemporal expression is optimized by choice of conditional and/or inducible expression systems, including controllable CRISPR effector activity optionally a destabilized CRISPR effector and/or a split CRISPR effector, and/or cell- or tissue-specific expression system.

[1065] The methods as described herein may further involve selection of the CRISPR-Cas system mode of delivery. In certain embodiments, gRNA (and tracr, if and where needed, optionally provided as a sgRNA) and/or CRISPR effector protein are or are to be delivered. In certain embodiments, gRNA (and tracr, if and where needed, optionally provided as a sgRNA) and/or CRISPR effector mRNA are or are to be delivered. In certain embodiments, gRNA (and tracr, if and where needed, optionally provided as a sgRNA) and/or CRISPR effector provided in a DNA-based expression system are or are to be delivered. In certain embodiments, delivery of the individual CRISPR-Cas system components comprises a combination of the above modes of delivery. In certain embodiments, delivery comprises delivering gRNA and/or CRISPR effector protein, delivering gRNA and/or CRISPR effector mRNA, or delivering gRNA and/or CRISPR effector as a DNA based expression system.

[1066] The methods as described herein may further involve selection of the CRISPR-Cas system delivery vehicle and/or expression system. Delivery vehicles and expression systems are described herein elsewhere. By means of example, delivery vehicles of nucleic acids and/or proteins include nanoparticles, liposomes, etc. Delivery vehicles for DNA, such as DNA-based expression systems include for instance biolistics, viral based vector systems (e.g. adenoviral, AAV, lentiviral), etc. the skilled person will understand that selection of the mode of delivery, as well as delivery vehicle or expression system may depend on for instance the cell or tissues to be targeted. In certain embodiments, the delivery vehicle and/or expression system for delivering the CRISPR-Cas systems or components thereof comprises liposomes, lipid particles, nanoparticles, biolistics, or viral-based expression/delivery systems.

### Considerations for Therapeutic Applications

[1067] A consideration in genome editing therapy is the choice of sequence-specific nuclease, such as a variant of a Cas (e.g., a small Type II-D Cas) nuclease. Each nuclease variant may possess its own unique set of strengths and weaknesses, many of which must be balanced in the context of treatment to maximize therapeutic benefit. For a specific editing therapy to be efficacious, a sufficiently high level of modification must be achieved in target cell populations to reverse disease symptoms. This therapeutic modification ‘threshold’ is determined by the fitness of edited cells following treatment and the amount of gene product necessary to reverse symptoms. With regard to fitness, editing creates three potential outcomes for treated cells relative to their unedited counterparts: increased, neutral, or decreased fitness. In the case of increased fitness, corrected cells may be able and expand relative to their diseased counterparts to mediate therapy. In this case, where edited cells possess a selective advantage, even low numbers of edited cells can be amplified through expansion, providing a therapeutic benefit to the patient. Where the edited cells possess no change in fitness, an increase the therapeutic modification threshold can be warranted. As such, significantly greater levels of editing may be needed to treat diseases, where editing creates a neutral fitness advantage, relative to diseases where editing creates increased fitness for target cells. If editing imposes a fitness disadvantage, as would be the case for restoring function to a tumor suppressor gene in cancer cells, modified cells would be outcompeted by their diseased counterparts, causing the benefit of treatment to be low relative to editing rates. This may be overcome with supplemental therapies to increase the potency and/or fitness of the edited cells relative to the diseased counterparts.

[1068] In addition to cell fitness, the amount of gene product necessary to treat disease can also influence the minimal level of therapeutic genome editing that can treat or prevent a disease or a symptom thereof. In cases where a small change in the gene product levels can result in significant changes in clinical outcome, the minimal level of therapeutic genome editing is less relative to cases where a larger change in the gene product levels are needed to gain a clinically relevant response. In some embodiments, the minimal level of therapeutic genome editing can range from 0.1 to 1%, 1-5%, 5-10%, 10-15%, 15-20%, 20-25%, 25-30%, 30-35%, 35-40%, 40-45%. 45-50%, or 50-55%. Thus, where a small change in gene product levels can influence clinical outcomes and diseases where there is a fitness advantage for edited cells, are ideal targets for genome editing therapy, as the therapeutic modification threshold is low enough to permit a high chance of success.

[1069] The activity of NHEJ and HDR DSB repair can vary by cell type and cell state. NHEJ is not highly regulated by the cell cycle and is efficient across cell types, allowing for high levels of gene disruption in accessible target cell populations. In contrast, HDR acts primarily during S/G2 phase, and is therefore restricted to cells that are actively dividing, limiting treatments that require precise genome modifications to mitotic cells [Ciccia, A. & Elledge, S. J. Molecular cell 40, 179-204 (2010); Chapman, J. R., et al. Molecular cell 47, 497-510 (2012)].

[1070] The efficiency of correction via HDR may be controlled by the epigenetic state or sequence of the targeted locus, or the specific repair template configuration (single vs. double stranded, long vs. short homology arms) used [Hacein-Bey-Abina, S., et al. The New England journal of medicine 346, 1185-1193 (2002); Gaspar, H. B., et al. Lancet 364, 2181-2187 (2004); Beumer, K. J., et al. G3 (2013)]. The relative activity of NHEJ and HDR machineries in target cells may also affect gene correction efficiency, as these pathways may compete to resolve DSBs [Beumer, K. J., et al. Proceedings of the National Academy of Sciences of the United States of America 105, 19821-19826 (2008)]. HDR also imposes a delivery challenge not seen with NHEJ strategies, as it uses the concurrent delivery of nucleases and repair templates. Thus, these differences can be kept in mind when designing, optimizing, and/or selecting a CRISPR-Cas based therapeutic as described in greater detail elsewhere herein.

[1071] CRISPR-Cas-based polynucleotide modification application can include combinations of proteins, small RNA molecules, and/or repair templates, and can make, in some embodiments, delivery of these multiple parts substantially more challenging than, for example, traditional small molecule therapeutics. Two main strategies for delivery of CRISPR-Cas systems and components thereof have been developed: ex vivo and in vivo. In some embodiments of ex vivo treatments, diseased cells are removed from a subject, edited and then transplanted back into the patient. In other embodiments, cells from a healthy allogeneic donor are collected, modified using a CRISPR-Cas system or component thereof, to impart various functionalities and/or reduce immunogenicity, and administered to an allogeneic recipient in need of treatment. ex vivo editing has the advantage of allowing the target cell population to be well defined and the specific dosage of therapeutic molecules delivered to cells to be specified. The latter consideration may be particularly important when off-target modifications are a concern, as titrating the amount of nuclease may decrease such mutations (Hsu et al., 2013). Another advantage of ex vivo approaches is the typically high editing rates that can be achieved, due to the development of efficient delivery systems for proteins and nucleic acids into cells in culture for research and gene therapy applications.

[1072] In vivo polynucleotide modification via CRISPR-Cas systems and/or components thereof involves direct delivery of the CRISPR-Cas systems and/or components thereof to cell types in their native tissues. In vivo polynucleotide modification via CRISPR-Cas systems and/or components thereof allows diseases in which the affected cell population is not amenable to ex vivo manipulation to be treated. Furthermore, delivering CRISPR-Cas systems and/or components thereof to cells in situ allows for the treatment of multiple tissue and cell types.

[1073] In some embodiments, such as those where viral vector systems are used to generate viral particles to deliver the CRISPR-Cas system and/or component thereof to a cell, the total cargo size of the CRISPR-Cas system and/or component thereof should be considered as vector systems can have limits on the size of a polynucleotide that can be expressed therefrom and/or packaged into cargo inside of a viral particle. In some embodiments, the tropism of a vector system, such as a viral vector system, should be considered as it can impact the cell type to which the CRISPR-Cas system or component thereof can be efficiently and/or effectively delivered.

[1074] When delivering a CRISPR-Cas system or component thereof via a viral-based system, it can be important to consider the amount of viral particles that will be needed to achieve a therapeutic effect so as to account for the potential immune response that can be elicited by the viral particles when delivered to a subject or cell(s). When delivering a CRISPR-Cas system or component thereof via a viral based system, it can be important to consider mechanisms of controlling the distribution and/or dosage of the CRISRP-Cas system in vivo. Generally, to reduce the potential for off-target effects, it is optimal but not necessarily required, that the amount of the CRISPR-Cas system be as close to the minimum or least effective dose. In practice this can be challenging to do.

[1075] In some embodiments, it can be important to consider the immunogenicity of the CRISPR-Cas system or component thereof. In embodiments, where the immunogenicity of the CRISPR-Cas system or component thereof is of concern, the immunogenicity CRISPR-Cas system or component thereof can be reduced. By way of example only, the immunogenicity of the CRISPR-Cas system or component thereof can be reduced using the approach set out in Tangri et al. Accordingly, directed evolution or rational design may be used to reduce the immunogenicity of the CRISPR enzyme (for instance a Cas (e.g. Cas9 and/or Cas12)) in the host species (human or other species).

### Methods of Using the CRISPR-Cas Systems in Plants and Fungi

[1076] The compositions, systems, and methods described herein can be used to perform gene or genome interrogation or editing or manipulation in plants and fungi. For example, the applications include investigation and/or selection and/or interrogations and/or comparison and/or manipulations and/or transformation of plant genes or genomes; e.g., to create, identify, develop, optimize, or confer trait(s) or characteristic(s) to plant(s) or to transform a plant or fugus genome. There can accordingly be improved production of plants, new plants with new combinations of traits or characteristics or new plants with enhanced traits. The compositions, systems, and methods can be used with regard to plants in Site-Directed Integration (SDI) or Gene Editing (GE) or any Near Reverse Breeding (NRB) or Reverse Breeding (RB) techniques.

[1077] The compositions, systems, and methods herein may be used to confer desired traits (e.g., enhanced nutritional quality, increased resistance to diseases and resistance to biotic and abiotic stress, and increased production of commercially valuable plant products or heterologous compounds) on essentially any plants and fungi, and their cells and tissues. The compositions, systems, and methods may be used to modify endogenous genes or to modify their expression without the permanent introduction into the genome of any foreign gene.

[1078] In some embodiments, compositions, systems, and methods may be used in genome editing in plants or where RNAi or similar genome editing techniques have been used previously; see, e.g., Nekrasov, “Plant genome editing made easy: targeted mutagenesis in model and crop plants using the CRISPR-Cas system,” Plant Methods 2013, 9:39 (doi:10.1186/1746-4811-9-39); Brooks, “Efficient gene editing in tomato in the first generation using the CRISPR-Cas9 system,” Plant Physiology September 2014 pp 114.247577; Shan, “Targeted genome modification of crop plants using a CRISPR-Cas system,” Nature Biotechnology 31, 686-688 (2013); Feng, “Efficient genome editing in plants using a CRISPR/Cas system,” Cell Research (2013) 23:1229-1232. doi:10.1038/cr.2013.114; published online 20 Aug. 2013; Xie, “RNA-guided genome editing in plants using a CRISPR-Cas system,” Mol Plant. 2013 November; 6(6):1975-83. doi: 10.1093/mp/sst119. Epub 2013 Aug. 17; Xu, “Gene targeting using the Agrobacterium tumefaciens-mediated CRISPR-Cas system in rice,” Rice 2014, 7:5 (2014), Zhou et al., “Exploiting SNPs for biallelic CRISPR mutations in the outcrossing woody perennial Populus reveals 4-coumarate: CoA ligase specificity and Redundancy,” New Phytologist (2015) (Forum) 1-4 (available online only at www.newphytologist.com); Caliando et al, “Targeted DNA degradation using a CRISPR device stably carried in the host genome, NATURE COMMUNICATIONS 6:6989, DOI: 10.1038/ncomms7989, www.nature.com/naturecommunications DOI: 10.1038/ncomms7989; U.S. Pat. No. 6,603,061—Agrobacterium-Mediated Plant Transformation Method; U.S. Pat. No. 7,868,149—Plant Genome Sequences and Uses Thereof and US 2009/0100536—Transgenic Plants with Enhanced Agronomic Traits, Morrell et al “Crop genomics: advances and applications,” Nat Rev Genet. 2011 Dec. 29; 13(2):85-96, all the contents and disclosure of each of which are herein incorporated by reference in their entirety. Embodiments and features of utilizing the compositions, systems, and methods may be analogous to the use of the CRISPR-Cas (e.g. CRISPR-Cas9) system in plants, and mention is made of the University of Arizona website “CRISPR-PLANT” (www.genome.arizona.edu/crispr/) (supported by Penn State and AGI).

[1079] The compositions, systems, and methods may also be used on protoplasts. A “protoplast” refers to a plant cell that has had its protective cell wall completely or partially removed using, for example, mechanical or enzymatic means resulting in an intact biochemical competent unit of living plant that can reform their cell wall, proliferate and regenerate grow into a whole plant under proper growing conditions.

[1080] The compositions, systems, and methods may be used for screening genes (e.g., endogenous, mutations) of interest. In some examples, genes of interest include those encoding enzymes involved in the production of a component of added nutritional value or generally genes affecting agronomic traits of interest, across species, phyla, and plant kingdom. By selectively targeting e.g., genes encoding enzymes of metabolic pathways, the genes responsible for certain nutritional aspects of a plant can be identified. Similarly, by selectively targeting genes which may affect a desirable agronomic trait, the relevant genes can be identified. Accordingly, the present invention encompasses screening methods for genes encoding enzymes involved in the production of compounds with a particular nutritional value and/or agronomic traits.

[1081] It is also understood that reference herein to animal cells may also apply, mutatis mutandis, to plant or fungal cells unless otherwise apparent; and the enzymes herein having reduced off-target effects and systems employing such enzymes can be used in plant applications, including those mentioned herein.

[1082] In some cases, nucleic acids introduced to plants and fungi may be codon optimized for expression in the plants and fungi. Methods of codon optimization include those described in Kwon K C, et al., Codon Optimization to Enhance Expression Yields Insights into Chloroplast Translation, Plant Physiol. 2016 September; 172(1):62-77.

[1083] The components (e.g., Cas proteins) in the compositions and systems may further comprise one or more functional domains described herein. In some examples, the functional domains may be an exonuclease. Such exonuclease may increase the efficiency of the Cas proteins' function, e.g., mutagenesis efficiency. An example of the functional domain is Trex2, as described in Weiss T et al., www.biorxiv.org/content/10.1101/2020.04.11.037572v1, doi: https://doi.org/10.1101/2020.04.11.037572.

### Examples of Plants

[1084] The compositions, systems, and methods herein can be used to confer desired traits on essentially any plant. A wide variety of plants and plant cell systems may be engineered for the desired physiological and agronomic characteristics. In general, the term “plant” relates to any various photosynthetic, eukaryotic, unicellular or multicellular organism of the kingdom Plantae characteristically growing by cell division, containing chloroplasts, and having cell walls comprised of cellulose. The term plant encompasses monocotyledonous and dicotyledonous plants.

[1085] The compositions, systems, and methods may be used over a broad range of plants, such as for example with dicotyledonous plants belonging to the orders Magniolales, Illiciales, Laurales, Piperales, Aristochiales, Nymphaeales, Ranunculales, Papeverales, Sarraceniaceae, Trochodendrales, Hamamelidales, Eucomiales, Leitneriales, Myricales, Fagales, Casuarinales, Caryophyllales, Batales, Polygonales, Plumbaginales, Dilleniales, Theales, Malvales, Urticales, Lecythidales, Violales, Salicales, Capparales, Ericales, Diapensales, Ebenales, Primulales, Rosales, Fabales, Podostemales, Haloragales, Myrtales, Cornales, Proteales, San tales, Rafflesiales, Celastrales, Euphorbiales, Rhamnales, Sapindales, Juglandales, Geraniales, Polygalales, Umbellales, Gentianales, Polemoniales, Lamiales, Plantaginales, Scrophulariales, Campanulales, Rubiales, Dipsacales, and Asterales; monocotyledonous plants such as those belonging to the orders Alismatales, Hydrocharitales, Najadales, Triuridales, Commelinales, Eriocaulales, Restionales, Poales, Juncales, Cyperales, Typhales, Bromeliales, Zingiberales, Arecales, Cyclanthales, Pandanales, Arales, Lilliales, and Orchid ales, or with plants belonging to Gymnospermae, e.g. those belonging to the orders Pinales, Ginkgoales, Cycadales, Araucariales, Cupressales and Gnetales.

[1086] The compositions, systems, and methods herein can be used over a broad range of plant species, included in the non-limitative list of dicot, monocot or gymnosperm genera hereunder: Atropa, Alseodaphne, Anacardium, Arachis, Beilschmiedia, Brassica, Carthamus, Cocculus, Croton, Cucumis, Citrus, Citrullus, Capsicum, Catharanthus, Cocos, Coffea, Cucurbita, Daucus, Duguetia, Eschscholzia, Ficus, Fragaria, Glaucium, Glycine, Gossypium, Helianthus, Hevea, Hyoscyamus, Lactuca, Landolphia, Linum, Litsea, Lycopersicon, Lupinus, Manihot, Majorana, Malus, Medicago, Nicotiana, Olea, Parthenium, Papaver, Persea, Phaseolus, Pistacia, Pisum, Pyrus, Prunus, Raphanus, Ricinus, Senecio, Sinomenium, Stephania, Sinapis, Solanum, Theobroma, Trifolium, Trigonella, Vicia, Vinca, Vilis, and Vigna; and the genera Allium, Andropogon, Aragrostis, Asparagus, Avena, Cynodon, Elaeis, Festuca, Festulolium, Heterocallis, Hordeum, Lemna, Lolium, Musa, Oryza, Panicum, Pannesetum, Phleum, Poa, Secale, Sorghum, Triticum, Zea, Abies, Cunninghamia, Ephedra, Picea, Pinus, and Pseudotsuga.

[1087] In some embodiments, target plants and plant cells for engineering include those monocotyledonous and dicotyledonous plants, such as crops including grain crops (e.g., wheat, maize, rice, millet, barley), fruit crops (e.g., tomato, apple, pear, strawberry, orange), forage crops (e.g., alfalfa), root vegetable crops (e.g., carrot, potato, sugar beets, yam), leafy vegetable crops (e.g., lettuce, spinach); flowering plants (e.g., petunia, rose, chrysanthemum), conifers and pine trees (e.g., pine fir, spruce); plants used in phytoremediation (e.g., heavy metal accumulating plants); oil crops (e.g., sunflower, rape seed) and plants used for experimental purposes (e.g., Arabidopsis). Specifically, the plants are intended to comprise without limitation angiosperm and gymnosperm plants such as acacia, alfalfa, amaranth, apple, apricot, artichoke, ash tree, asparagus, avocado, banana, barley, beans, beet, birch, beech, blackberry, blueberry, broccoli, Brussel's sprouts, cabbage, canola, cantaloupe, carrot, cassava, cauliflower, cedar, a cereal, celery, chestnut, cherry, Chinese cabbage, citrus, clementine, clover, coffee, corn, cotton, cowpea, cucumber, cypress, eggplant, elm, endive, eucalyptus, fennel, figs, fir, geranium, grape, grapefruit, groundnuts, ground cherry, gum hemlock, hickory, kale, kiwifruit, kohlrabi, larch, lettuce, leek, lemon, lime, locust, pine, maidenhair, maize, mango, maple, melon, millet, mushroom, mustard, nuts, oak, oats, oil palm, okra, onion, orange, an ornamental plant or flower or tree, papaya, palm, parsley, parsnip, pea, peach, peanut, pear, peat, pepper, persimmon, pigeon pea, pine, pineapple, plantain, plum, pomegranate, potato, pumpkin, radicchio, radish, rapeseed, raspberry, rice, rye, sorghum, safflower, sallow, soybean, spinach, spruce, squash, strawberry, sugar beet, sugarcane, sunflower, sweet potato, sweet corn, tangerine, tea, tobacco, tomato, trees, triticale, turf grasses, turnips, vine, walnut, watercress, watermelon, wheat, yams, yew, and zucchini.

[1088] The term plant also encompasses Algae, which are mainly photoautotrophs unified primarily by their lack of roots, leaves and other organs that characterize higher plants. The compositions, systems, and methods can be used over a broad range of “algae” or “algae cells.” Examples of algae include eukaryotic phyla, including the Rhodophyta (red algae), Chlorophyta (green algae), Phaeophyta (brown algae), Bacillariophyta (diatoms), Eustigmatophyta and dinoflagellates as well as the prokaryotic phylum Cyanobacteria (blue-green algae). Examples of algae species include those of Amphora, Anabaena, Anikstrodesmis, Botryococcus, Chaetoceros, Chlamydomonas, Chlorella, Chlorococcum, Cyclotella, Cylindrotheca, Dunaliella, Emiliana, Euglena, Hematococcus, Isochrysis, Monochrysis, Monoraphidium, Nannochloris, Nannnochloropsis, Navicula, Nephrochloris, Nephroselmis, Nitzschia, Nodularia, Nostoc, Oochromonas, Oocystis, Oscillartoria, Pavlova, Phaeodactylum, Playtmonas, Pleurochrysis, Porhyra, Pseudoanabaena, Pyramimonas, Stichococcus, Synechococcus, Synechocystis, Tetraselmis, Thalassiosira, and Trichodesmium.

### Plant Promoters

[1089] In order to ensure appropriate expression in a plant cell, the components of the components and systems herein may be placed under control of a plant promoter. A plant promoter is a promoter operable in plant cells. A plant promoter is capable of initiating transcription in plant cells, whether or not its origin is a plant cell. The use of different types of promoters is envisaged.

[1090] In some examples, the plant promoter is a constitutive plant promoter, which is a promoter that is able to express the open reading frame (ORF) that it controls in all or nearly all of the plant tissues during all or nearly all developmental stages of the plant (referred to as “constitutive expression”). One example of a constitutive promoter is the cauliflower mosaic virus 35S promoter. In some examples, the plant promoter is a regulated promoter, which directs gene expression not constitutively, but in a temporally- and/or spatially-regulated manner, and includes tissue-specific, tissue-preferred and inducible promoters. Different promoters may direct the expression of a gene in different tissues or cell types, or at different stages of development, or in response to different environmental conditions. In some examples, the plant promoter is a tissue-preferred promoters, which can be utilized to target enhanced expression in certain cell types within a particular plant tissue, for instance vascular cells in leaves or roots or in specific cells of the seed.

[1091] Exemplary plant promoters include those obtained from plants, plant viruses, and bacteria such as Agrobacterium or Rhizobium which comprise genes expressed in plant cells. Additional examples of promoters include those described in Kawamata et al., (1997) Plant Cell Physiol 38:792-803; Yamamoto et al., (1997) Plant J 12:255-65; Hire et al, (1992) Plant Mol Biol 20:207-18, Kuster et al, (1995) Plant Mol Biol 29:759-72, and Capana et al., (1994) Plant Mol Biol 25:681-91.

[1092] In some examples, a plant promoter may be an inducible promoter, which is inducible and allows for spatiotemporal control of gene editing or gene expression may use a form of energy. The form of energy may include sound energy, electromagnetic radiation, chemical energy and/or thermal energy. Examples of inducible systems include tetracycline inducible promoters (Tet-On or Tet-Off), small molecule two-hybrid transcription activations systems (FKBP, ABA, etc.), or light inducible systems (Phytochrome, LOV domains, or cryptochrome), such as a Light Inducible Transcriptional Effector (LITE) that direct changes in transcriptional activity in a sequence-specific manner. In a particular example, of the components of a light inducible system include a Cas protein, a light-responsive cytochrome heterodimer (e.g. from Arabidopsis thaliana), and a transcriptional activation/repression domain.

[1093] In some examples, the promoter may be a chemical-regulated promotor (where the application of an exogenous chemical induces gene expression) or a chemical-repressible promoter (where application of the chemical represses gene expression). Examples of chemical-inducible promoters include maize ln2-2 promoter (activated by benzene sulfonamide herbicide safeners), the maize GST promoter (activated by hydrophobic electrophilic compounds used as pre-emergent herbicides), the tobacco PR-1 a promoter (activated by salicylic acid), promoters regulated by antibiotics (such as tetracycline-inducible and tetracycline-repressible promoters).

### Stable Integration in the Genome of Plants

[1094] In some embodiments, polynucleotides encoding the components of the compositions and systems may be introduced for stable integration into the genome of a plant cell. In some cases, vectors or expression systems may be used for such integration. The design of the vector or the expression system can be adjusted depending on for when, where and under what conditions the guide RNA and/or the Cas gene are expressed. In some cases, the polynucleotides may be integrated into an organelle of a plant, such as a plastid, mitochondrion or a chloroplast. The elements of the expression system may be on one or more expression constructs which are either circular such as a plasmid or transformation vector, or non-circular such as linear double stranded DNA.

[1095] In some embodiments, the method of integration generally comprises the steps of selecting a suitable host cell or host tissue, introducing the construct(s) into the host cell or host tissue, and regenerating plant cells or plants therefrom. In some examples, the expression system for stable integration into the genome of a plant cell may contain one or more of the following elements: a promoter element that can be used to express the RNA and/or Cas enzyme in a plant cell; a 5′ untranslated region to enhance expression; an intron element to further enhance expression in certain cells, such as monocot cells; a multiple-cloning site to provide convenient restriction sites for inserting the guide RNA and/or the Cas gene sequences and other desired elements; and a 3′ untranslated region to provide for efficient termination of the expressed transcript.

### Transient Expression in Plants

[1096] In some embodiments, the components of the compositions and systems may be transiently expressed in the plant cell. In some examples, the compositions and systems may modify a target nucleic acid only when both the guide RNA and the Cas protein are present in a cell, such that genomic modification can further be controlled. As the expression of the Cas protein is transient, plants regenerated from such plant cells typically contain no foreign DNA. In certain examples, the Cas protein is stably expressed and the guide sequence is transiently expressed.

[1097] DNA and/or RNA (e.g., mRNA) may be introduced to plant cells for transient expression. In such cases, the introduced nucleic acid may be provided in sufficient quantity to modify the cell but do not persist after a contemplated period of time has passed or after one or more cell divisions.

[1098] The transient expression may be achieved using suitable vectors. Exemplary vectors that may be used for transient expression include a pEAQ vector (may be tailored for Agrobacterium-mediated transient expression) and Cabbage Leaf Curl virus (CaLCuV), and vectors described in Sainsbury F. et al., Plant Biotechnol J. 2009 September; 7(7):682-93; and Yin K et al., Scientific Reports volume 5, Article number: 14926 (2015).

[1099] Combinations of the different methods described above are also envisaged.

Translocation to and/or Expression in Specific Plant Organelles

[1100] The compositions and systems herein may comprise elements for translocation to and/or expression in a specific plant organelle.

### Chloroplast Targeting

[1101] In some embodiments, it is envisaged that the compositions and systems are used to specifically modify chloroplast genes or to ensure expression in the chloroplast. The compositions and systems (e.g., Cas proteins, guide molecules, or their encoding polynucleotides) may be transformed, compartmentalized, and/or targeted to the chloroplast. In an example, the introduction of genetic modifications in the plastid genome can reduce biosafety issues such as gene flow through pollen.

[1102] Examples of methods of chloroplast transformation include Particle bombardment, PEG treatment, and microinjection, and the translocation of transformation cassettes from the nuclear genome to the plastid. In some examples, targeting of chloroplasts may be achieved by incorporating in chloroplast localization sequence, and/or the expression construct a sequence encoding a chloroplast transit peptide (CTP) or plastid transit peptide, operably linked to the 5′ region of the sequence encoding the components of the compositions and systems. Additional examples of transforming, targeting and localization of chloroplasts include those described in WO2010061186, Protein Transport into Chloroplasts, 2010, Annual Review of Plant Biology, Vol. 61: 157-180, and US 20040142476, which are incorporated by reference herein in their entireties.

### Exemplary Applications in Plants

[1103] The compositions, systems, and methods may be used to generate genetic variation(s) in a plant (e.g., crop) of interest. One or more, e.g., a library of, guide molecules targeting one or more locations in a genome may be provided and introduced into plant cells together with the Cas effector protein. For example, a collection of genome-scale point mutations and gene knock-outs can be generated. In some examples, the compositions, systems, and methods may be used to generate a plant part or plant from the cells so obtained and screening the cells for a trait of interest. The target genes may include both coding and non-coding regions. In some cases, the trait is stress tolerance and the method is a method for the generation of stress-tolerant crop varieties.

[1104] In some embodiments, the compositions, systems, and methods are used to modify endogenous genes or to modify their expression. The expression of the components may induce targeted modification of the genome, either by direct activity of the Cas nuclease and optionally introduction of template DNA, or by modification of genes targeted. The different strategies described herein above allow Cas-mediated targeted genome editing without requiring the introduction of the components into the plant genome.

[1105] In some cases, the modification may be performed without the permanent introduction into the genome of the plant of any foreign gene, including those encoding CRISPR components, so as to avoid the presence of foreign DNA in the genome of the plant. This can be of interest as the regulatory requirements for non-transgenic plants are less rigorous. Components which are transiently introduced into the plant cell are typically removed upon crossing.

[1106] For example, the modification may be performed by transient expression of the components of the compositions and systems. The transient expression may be performed by delivering the components of the compositions and systems with viral vectors, delivery into protoplasts, with the aid of particulate molecules such as nanoparticles or CPPs.

Generation of Plants with Desired Traits

[1107] The compositions, systems, and methods herein may be used to introduce desired traits to plants. The approaches include introduction of one or more foreign genes to confer a trait of interest, editing or modulating endogenous genes to confer a trait of interest.

### Agronomic Traits

[1108] In some embodiments, crop plants can be improved by influencing specific plant traits. Examples of the traits include improved agronomic traits such as herbicide resistance, disease resistance, abiotic stress tolerance, high yield, and superior quality, pesticide-resistance, disease resistance, insect and nematode resistance, resistance against parasitic weeds, drought tolerance, nutritional value, stress tolerance, self-pollination voidance, forage digestibility biomass, and grain yield.

[1109] In some embodiments, genes that confer resistance to pests or diseases may be introduced to plants. In cases there are endogenous genes that confer such resistance in plants, their expression and function may be enhanced (e.g., by introducing extra copies, modifications that enhance expression and/or activity).

[1110] Examples of genes that confer resistance include plant disease resistance genes (e.g., Cf-9, Pto, RSP2, SlDMR6-1), genes conferring resistance to a pest (e.g., those described in WO96/30517), Bacillus thuringiensis proteins, lectins, Vitamin-binding proteins (e.g., avidin), enzyme inhibitors (e.g., protease or proteinase inhibitors or amylase inhibitors), insect-specific hormones or pheromones (e.g., ecdysteroid or a juvenile hormone, variant thereof, a mimetic based thereon, or an antagonist or agonist thereof) or genes involved in the production and regulation of such hormone and pheromones, insect-specific peptides or neuropeptide, Insect-specific venom (e.g., produced by a snake, a wasp, etc., or analog thereof), Enzymes responsible for a hyperaccumulation of a monoterpene, a sesquiterpene, a steroid, hydroxamic acid, a phenylpropanoid derivative or another nonprotein molecule with insecticidal activity, Enzymes involved in the modification of biologically active molecule (e.g., a glycolytic enzyme, a proteolytic enzyme, a lipolytic enzyme, a nuclease, a cyclase, a transaminase, an esterase, a hydrolase, a phosphatase, a kinase, a phosphorylase, a polymerase, an elastase, a chitinase and a glucanase, whether natural or synthetic), molecules that stimulates signal transduction, Viral-invasive proteins or a complex toxin derived therefrom, Developmental-arrestive proteins produced in nature by a pathogen or a parasite, a developmental-arrestive protein produced in nature by a plant, or any combination thereof.

[1111] The compositions, systems, and methods may be used to identify, screen, introduce or remove mutations or sequences lead to genetic variability that give rise to susceptibility to certain pathogens, e.g., host specific pathogens. Such approach may generate plants that are non-host resistance, e.g., the host and pathogen are incompatible or there can be partial resistance against all races of a pathogen, typically controlled by many genes and/or also complete resistance to some races of a pathogen but not to other races.

[1112] In some embodiments, compositions, systems, and methods may be used to modify genes involved in plant diseases. Such genes may be removed, inactivated, or otherwise regulated or modified. Examples of plant diseases include those described in [0045]-[0080] of US20140213619A1, which is incorporated by reference herein in its entirety.

[1113] In some embodiments, genes that confer resistance to herbicides may be introduced to plants. Examples of genes that confer resistance to herbicides include genes conferring resistance to herbicides that inhibit the growing point or meristem, such as an imidazolinone or a sulfonylurea, genes conferring glyphosate tolerance (e.g., resistance conferred by, e.g., mutant 5-enolpyruvylshikimate-3-phosphate synthase genes, aroA genes and glyphosate acetyl transferase (GAT) genes, respectively), or resistance to other phosphono compounds such as by glufosinate (phosphinothricin acetyl transferase (PAT) genes from Streptomyces species, including Streptomyces hygroscopicus and Streptomyces viridichromogenes), and to pyridinoxy or phenoxy proprionic acids and cyclohexones by ACCase inhibitor-encoding genes), genes conferring resistance to herbicides that inhibit photosynthesis (such as a triazine (psbA and gs+ genes) or a benzonitrile (nitrilase gene), and glutathione S-transferase), genes encoding enzymes detoxifying the herbicide or a mutant glutamine synthase enzyme that is resistant to inhibition, genes encoding a detoxifying enzyme is an enzyme encoding a phosphinothricin acetyltransferase (such as the bar or pat protein from Streptomyces species), genes encoding hydroxyphenylpyruvatedioxygenases (HPPD) inhibitors, e.g., naturally occurring HPPD resistant enzymes, and genes encoding a mutated or chimeric HPPD enzyme.

[1114] In some embodiments, genes involved in Abiotic stress tolerance may be introduced to plants. Examples of genes include those capable of reducing the expression and/or the activity of poly(ADP-ribose) polymerase (PARP) gene, transgenes capable of reducing the expression and/or the activity of the PARG encoding genes, genes coding for a plant-functional enzyme of the nicotineamide adenine dinucleotide salvage synthesis pathway including nicotinamidase, nicotinate phosphoribosyltransferase, nicotinic acid mononucleotide adenyl transferase, nicotinamide adenine dinucleotide synthetase or nicotine amide phosphorybosyltransferase, enzymes involved in carbohydrate biosynthesis, enzymes involved in the production of polyfructose (e.g., the inulin and levan-type), the production of alpha-1,6 branched alpha-1,4-glucans, the production of alternan, the production of hyaluronan.

[1115] In some embodiments, genes that improve drought resistance may be introduced to plants. Examples of genes Ubiquitin Protein Ligase protein (UPL) protein (UPL3), DR02, DR03, ABC transporter, and DREB1A.

### Nutritionally Improved Plants

[1116] In some embodiments, the compositions, systems, and methods may be used to produce nutritionally improved plants. In some examples, such plants may provide functional foods, e.g., a modified food or food ingredient that may provide a health benefit beyond the traditional nutrients it contains. In certain examples, such plants may provide nutraceuticals foods, e.g., substances that may be considered a food or part of a food and provides health benefits, including the prevention and treatment of disease. The nutraceutical foods may be useful in the prevention and/or treatment of diseases in animals and humans, e.g., cancers, diabetes, cardiovascular disease, and hypertension.

[1117] An improved plant may naturally produce one or more desired compounds and the modification may enhance the level or activity or quality of the compounds. In some cases, the improved plant may not naturally produce the compound(s), while the modification enables the plant to produce such compound(s). In some cases, the compositions, systems, and methods used to modify the endogenous synthesis of these compounds indirectly, e.g. by modifying one or more transcription factors that controls the metabolism of this compound.

[1118] Examples of nutritionally improved plants include plants comprising modified protein quality, content and/or amino acid composition, essential amino acid contents, oils and fatty acids, carbohydrates, vitamins and carotenoids, functional secondary metabolites, and minerals. In some examples, the improved plants may comprise or produce compounds with health benefits. Examples of nutritionally improved plants include those described in Newell-McGloughlin, Plant Physiology, July 2008, Vol. 147, pp. 939-953.

[1119] Examples of compounds that can be produced include carotenoids (e.g., α-Carotene or β-Carotene), lutein, lycopene, Zeaxanthin, Dietary fiber (e.g., insoluble fibers, β-Glucan, soluble fibers, fatty acids (e.g., ω-3 fatty acids, Conjugated linoleic acid, GLA), Flavonoids (e.g., Hydroxycinnamates, flavonols, catechins and tannins), Glucosinolates, indoles, isothiocyanates (e.g., Sulforaphane), Phenolics (e.g., stilbenes, caffeic acid and ferulic acid, epicatechin), Plant stanols/sterols, Fructans, inulins, fructo-oligosaccharides, Saponins, Soybean proteins, Phytoestrogens (e.g., isoflavones, lignans), Sulfides and thiols such as diallyl sulphide, Allyl methyl trisulfide, dithiolthiones, Tannins, such as proanthocyanidins, or any combination thereof.

[1120] The compositions, systems, and methods may also be used to modify protein/starch functionality, shelf life, taste/aesthetics, fiber quality, and allergen, antinutrient, and toxin reduction traits.

[1121] Examples of genes and nucleic acids that can be modified to introduce the traits include stearyl-ACP desaturase, DNA associated with the single allele which may be responsible for maize mutants characterized by low levels of phytic acid, Tf RAP2.2 and its interacting partner SINAT2, Tf Dof1, and DOF Tf AtDof1.1 (OBP2).

### Modification of Polyploid Plants

[1122] The compositions, systems, and methods may be used to modify polyploid plants. Polyploid plants carry duplicate copies of their genomes (e.g. as many as six, such as in wheat). In some cases, the compositions, systems, and methods may be can be multiplexed to affect all copies of a gene, or to target dozens of genes at once. For instance, the compositions, systems, and methods may be used to simultaneously ensure a loss of function mutation in different genes responsible for suppressing defenses against a disease. The modification may be simultaneous suppression the expression of the TaMLO-Al, TaMLO-Bl and TaMLO-Dl nucleic acid sequence in a wheat plant cell and regenerating a wheat plant therefrom, in order to ensure that the wheat plant is resistant to powdery mildew (e.g., as described in WO2015109752).

### Regulation of Fruit-Ripening

[1123] The compositions, systems, and methods may be used to regulate ripening of fruits. Ripening is a normal phase in the maturation process of fruits and vegetables. Only a few days after it starts it may render a fruit or vegetable inedible, which can bring significant losses to both farmers and consumers.

[1124] In some embodiments, the compositions, systems, and methods are used to reduce ethylene production. In some examples, the compositions, systems, and methods may be used to suppress the expression and/or activity of ACC synthase, insert a ACC deaminase gene or a functional fragment thereof, insert a SAM hydrolase gene or functional fragment thereof, suppress ACC oxidase gene expression

[1125] Alternatively or additionally, the compositions, systems, and methods may be used to modify ethylene receptors (e.g., suppressing ETR1) and/or Polygalacturonase (PG). Suppression of a gene may be achieved by introducing a mutation, an antisense sequence, and/or a truncated copy of the gene to the genome.

### Increasing Storage Life of Plants

[1126] In some embodiments, the compositions, systems, and methods are used to modify genes involved in the production of compounds which affect storage life of the plant or plant part. The modification may be in a gene that prevents the accumulation of reducing sugars in potato tubers. Upon high-temperature processing, these reducing sugars react with free amino acids, resulting in brown, bitter-tasting products and elevated levels of acrylamide, which is a potential carcinogen. In particular embodiments, the methods provided herein are used to reduce or inhibit expression of the vacuolar invertase gene (VInv), which encodes a protein that breaks down sucrose to glucose and fructose.

### Reducing Allergens in Plants

[1127] In some embodiments, the compositions, systems, and methods are used to generate plants with a reduced level of allergens, making them safer for consumers. To this end, the compositions, systems, and methods may be used to identify and modify (e.g., suppress) one or more genes responsible for the production of plant allergens. Examples of such genes include Lol p5, as well as those in peanuts, soybeans, lentils, peas, lupin, green beans, mung beans, such as those described in Nicolaou et al., Current Opinion in Allergy and Clinical Immunology 2011; 11(3):222), which is incorporated by reference herein in its entirety.

### Generation of Male Sterile Plants

[1128] The compositions, systems, and methods may be used to generate male sterile plants. Hybrid plants typically have advantageous agronomic traits compared to inbred plants. However, for self-pollinating plants, the generation of hybrids can be challenging. In different plant types (e.g., maize and rice), genes have been identified which are important for plant fertility, more particularly male fertility. Plants that are as such genetically altered can be used in hybrid breeding programs.

[1129] The compositions, systems, and methods may be used to modify genes involved male fertility, e.g., inactivating (such as by introducing mutations to) genes required for male fertility. Examples of the genes involved in male fertility include cytochrome P450-like gene (MS26) or the meganuclease gene (MS45), and those described in Wan X et al., Mol Plant. 2019 Mar. 4; 12(3):321-342; and Kim Y J, et al., Trends Plant Sci. 2018 January; 23(1):53-65.

### Increasing the Fertility Stage in Plants

[1130] In some embodiments, the compositions, systems, and methods may be used to prolong the fertility stage of a plant such as of a rice. For instance, a rice fertility stage gene such as Ehd3 can be targeted in order to generate a mutation in the gene and plantlets can be selected for a prolonged regeneration plant fertility stage.

### Production of Early Yield of Products

[1131] In some embodiments, the compositions, systems, and methods may be used to produce early yield of the product. For example, flowering process may be modulated, e.g., by mutating flowering repressor gene such as SP5G. Examples of such approaches include those described in Soyk S, et al., Nat Genet. 2017 January; 49(1):162-168.

### Oil and Biofuel Production

[1132] The compositions, systems, and methods may be used to generate plants for oil and biofuel production. Biofuels include fuels made from plant and plant-derived resources. Biofuels may be extracted from organic matter whose energy has been obtained through a process of carbon fixation or are made through the use or conversion of biomass. This biomass can be used directly for biofuels or can be converted to convenient energy containing substances by thermal conversion, chemical conversion, and biochemical conversion. This biomass conversion can result in fuel in solid, liquid, or gas form. Biofuels include bioethanol and biodiesel. Bioethanol can be produced by the sugar fermentation process of cellulose (starch), which may be derived from maize and sugar cane. Biodiesel can be produced from oil crops such as rapeseed, palm, and soybean. Biofuels can be used for transportation.

### Generation of Plants for Production of Vegetable Oils and Biofuels

[1133] The compositions, systems, and methods may be used to generate algae (e.g., diatom) and other plants (e.g., grapes) that express or overexpress high levels of oil or biofuels.

[1134] In some cases, the compositions, systems, and methods may be used to modify genes involved in the modification of the quantity of lipids and/or the quality of the lipids. Examples of such genes include those involved in the pathways of fatty acid synthesis, e.g., acetyl-CoA carboxylase, fatty acid synthase, 3-ketoacyl_acyl-carrier protein synthase III, glycerol-3-phosphate dehydrogenase (G3PDH), Enoyl-acyl carrier protein reductase (Enoyl-ACP-reductase), glycerol-3-phosphate acyltransferase, lysophosphatidic acyl transferase or diacylglycerol acyltransferase, phospholipid:diacylglycerol acyltransferase, phosphatidate phosphatase, fatty acid thioesterase such as palmitoyl protein thioesterase, or malic enzyme activities.

[1135] In further embodiments, it is envisaged to generate diatoms that have increased lipid accumulation. This can be achieved by targeting genes that decrease lipid catabolization. Examples of genes include those involved in the activation of triacylglycerol and free fatty acids, β-oxidation of fatty acids, such as genes of acyl-CoA synthetase, 3-ketoacyl-CoA thiolase, acyl-CoA oxidase activity and phosphoglucomutase.

[1136] In some examples, algae may be modified for production of oil and biofuels, including fatty acids (e.g., fatty esters such as acid methyl esters (FAME) and fatty acid ethyl esters (FAEE)). Examples of methods of modifying microalgae include those described in Stovicek et al. Metab. Eng. Comm., 2015; 2:1; U.S. Pat. No. 8,945,839; and WO 2015086795.

[1137] In some examples, one or more genes may be introduced (e.g., overexpressed) to the plants (e.g., algae) to produce oils and biofuels (e.g., fatty acids) from a carbon source (e.g., alcohol). Examples of the genes include genes encoding acyl-CoA synthases, ester synthases, thioesterases (e.g., tesA, ′tesA, tesB, fatB, fatB2, fatB3, fatA1, or fatA), acyl-CoA synthases (e.g., fadD, JadK, BH3103, pfl-4354, EAV15023, fadDl, fadD2, RPC_4074, fadDD35, fadDD22, faa39), ester synthases (e.g., synthase/acyl-CoA:diacylglycerl acyltransferase from Simmondsia chinensis, Acinetobacter sp. ADP, Alcanivorax borkumensis, Pseudomonas aeruginosa, Fundibacter jadensis, Arabidopsis thaliana, or Alkaligenes eutrophus, or variants thereof).

[1138] Additionally or alternatively, one or more genes in the plants (e.g., algae) may be inactivated (e.g., expression of the genes is decreased). For examples, one or more mutations may be introduced to the genes. Examples of such genes include genes encoding acyl-CoA dehydrogenases (e.g., fade), outer membrane protein receptors, and transcriptional regulator (e.g., repressor) of fatty acid biosynthesis (e.g., fabR), pyruvate formate lyases (e.g., pflB), lactate dehydrogenases (e.g., IdhA).

### Organic Acid Production

[1139] In some embodiments, plants may be modified to produce organic acids such as lactic acid. The plants may produce organic acids using sugars, pentose or hexose sugars. To this end, one or more genes may be introduced (e.g., and overexpressed) in the plants. An example of such genes include LDH gene.

[1140] In some examples, one or more genes may be inactivated (e.g., expression of the genes is decreased). For examples, one or more mutations may be introduced to the genes. The genes may include those encoding proteins involved an endogenous metabolic pathway which produces a metabolite other than the organic acid of interest and/or wherein the endogenous metabolic pathway consumes the organic acid.

[1141] Examples of genes that can be modified or introduced include those encoding pyruvate decarboxylases (pdc), fumarate reductases, alcohol dehydrogenases (adh), acetaldehyde dehydrogenases, phosphoenolpyruvate carboxylases (ppc), D-lactate dehydrogenases (d-ldh), L-lactate dehydrogenases (1-ldh), lactate 2-monooxygenases, lactate dehydrogenase, cytochrome-dependent lactate dehydrogenases (e.g., cytochrome B2-dependent L-lactate dehydrogenases).

### Enhancing Plant Properties for Biofuel Production

[1142] In some embodiments, the compositions, systems, and methods are used to alter the properties of the cell wall of plants to facilitate access by key hydrolyzing agents for a more efficient release of sugars for fermentation. By reducing the proportion of lignin in a plant the proportion of cellulose can be increased. In particular embodiments, lignin biosynthesis may be downregulated in the plant so as to increase fermentable carbohydrates.

[1143] In some examples, one or more lignin biosynthesis genes may be down regulated. Examples of such genes include 4-coumarate 3-hydroxylases (C3H), phenylalanine ammonia-lyases (PAL), cinnamate 4-hydroxylases (C4H), hydroxycinnamoyl transferases (HCT), caffeic acid O-methyltransferases (COMT), caffeoyl CoA 3-O-methyltransferases (CCoAOMT), ferulate 5-hydroxylases (F5H), cinnamyl alcohol dehydrogenases (CAD), cinnamoyl CoA-reductases (CCR), 4-coumarate-CoA ligases (4CL), monolignol-lignin-specific glycosyltransferases, and aldehyde dehydrogenases (ALDH), and those described in WO 2008064289.

[1144] In some examples, plant mass that produces lower level of acetic acid during fermentation may be reduced. To this end, genes involved in polysaccharide acetylation (e.g., Cas1L and those described in WO 2010096488) may be inactivated.

### Other Microorganisms for Oils and Biofuel Production

[1145] In some embodiments, microorganisms other than plants may be used for production of oils and biofuels using the compositions, systems, and methods herein. Examples of the microorganisms include those of the genus of Escherichia, Bacillus, Lactobacillus, Rhodococcus, Synechococcus, Synechoystis, Pseudomonas, Aspergillus, Trichoderma, Neurospora, Fusarium, Humicola, Rhizomucor, Kluyveromyces, Pichia, Mucor, Myceliophtora, Penicillium, Phanerochaete, Pleurotus, Trametes, Chrysosporium, Saccharomyces, Stenotrophamonas, Schizosaccharomyces, Yarrowia, or Streptomyces.

### Plant Cultures and Regeneration

[1146] In some embodiments, the modified plants or plant cells may be cultured to regenerate a whole plant which possesses the transformed or modified genotype and thus the desired phenotype. Examples of regeneration techniques include those relying on manipulation of certain phytohormones in a tissue culture growth medium, relying on a biocide and/or herbicide marker which has been introduced together with the desired nucleotide sequences, obtaining from cultured protoplasts, plant callus, explants, organs, pollens, embryos or parts thereof.

### Detecting Modifications in the Plant Genome—Selectable Markers

[1147] When the compositions, systems, and methods are used to modify a plant, suitable methods may be used to confirm and detect the modification made in the plant. In some examples, when a variety of modifications are made, one or more desired modifications or traits resulting from the modifications may be selected and detected. The detection and confirmation may be performed by biochemical and molecular biology techniques such as Southern analysis, PCR, Northern blot, Si RNase protection, primer-extension or reverse transcriptase-PCR, enzymatic assays, ribozyme activity, gel electrophoresis, Western blot, immunoprecipitation, enzyme-linked immunoassays, in situ hybridization, enzyme staining, and immunostaining.

[1148] In some cases, one or more markers, such as selectable and detectable markers, may be introduced to the plants. Such markers may be used for selecting, monitoring, isolating cells and plants with desired modifications and traits. A selectable marker can confer positive or negative selection and is conditional or non-conditional on the presence of external substrates. Examples of such markers include genes and proteins that confer resistance to antibiotics, such as hygromycin (hpt) and kanamycin (nptII), and genes that confer resistance to herbicides, such as phosphinothricin (bar) and chlorosulfuron (als), enzyme capable of producing or processing colored substances (e.g., the β-glucuronidase, luciferase, B or C1 genes).

### Applications in Fungi

[1149] The compositions, systems, and methods described herein can be used to perform efficient and cost effective gene or genome interrogation or editing or manipulation in fungi or fungal cells, such as yeast. The approaches and applications in plants may be applied to fungi as well.

[1150] A fungal cell may be any type of eukaryotic cell within the kingdom of fungi, such as phyla of Ascomycota, Basidiomycota, Blastocladiomycota, Chytridiomycota, Glomeromycota, Microsporidia, and Neocallimastigomycota. Examples of fungi or fungal cells in include yeasts, molds, and filamentous fungi.

[1151] In some embodiments, the fungal cell is a yeast cell. A yeast cell refers to any fungal cell within the phyla Ascomycota and Basidiomycota. Examples of yeasts include budding yeast, fission yeast, and mold, S. cerervisiae, Kluyveromyces marxianus, Issatchenkia orientalis, Candida spp. (e.g., Candida albicans), Yarrowia spp. (e.g., Yarrowia lipolytica), Pichia spp. (e.g., Pichia pastoris), Kluyveromyces spp. (e.g., Kluyveromyces lactis and Kluyveromyces marxianus), Neurospora spp. (e.g., Neurospora crassa), Fusarium spp. (e.g., Fusarium oxysporum), and Issatchenkia spp. (e.g., Issatchenkia orientalis, Pichia kudriavzevii and Candida acidothermophilum).

[1152] In some embodiments, the fungal cell is a filamentous fungal cell, which grow in filaments, e.g., hyphae or mycelia. Examples of filamentous fungal cells include Aspergillus spp. (e.g., Aspergillus niger), Trichoderma spp. (e.g., Trichoderma reesei), Rhizopus spp. (e.g., Rhizopus oryzae), and Mortierella spp. (e.g., Mortierella isabellina).

[1153] In some embodiments, the fungal cell is of an industrial strain. Industrial strains include any strain of fungal cell used in or isolated from an industrial process, e.g., production of a product on a commercial or industrial scale. Industrial strain may refer to a fungal species that is typically used in an industrial process, or it may refer to an isolate of a fungal species that may be also used for non-industrial purposes (e.g., laboratory research). Examples of industrial processes include fermentation (e.g., in production of food or beverage products), distillation, biofuel production, production of a compound, and production of a polypeptide. Examples of industrial strains include, without limitation, JAY270 and ATCC4124.

[1154] In some embodiments, the fungal cell is a polyploid cell whose genome is present in more than one copy. Polyploid cells include cells naturally found in a polyploid state, and cells that has been induced to exist in a polyploid state (e.g., through specific regulation, alteration, inactivation, activation, or modification of meiosis, cytokinesis, or DNA replication). A polyploid cell may be a cell whose entire genome is polyploid, or a cell that is polyploid in a particular genomic locus of interest. In some examples, the abundance of guide RNA may more often be a rate-limiting component in genome engineering of polyploid cells than in haploid cells, and thus the methods using the CRISPR system described herein may take advantage of using certain fungal cell types.

[1155] In some embodiments, the fungal cell is a diploid cell, whose genome is present in two copies. Diploid cells include cells naturally found in a diploid state, and cells that have been induced to exist in a diploid state (e.g., through specific regulation, alteration, inactivation, activation, or modification of meiosis, cytokinesis, or DNA replication). A diploid cell may refer to a cell whose entire genome is diploid, or it may refer to a cell that is diploid in a particular genomic locus of interest.

[1156] In some embodiments, the fungal cell is a haploid cell, whose genome is present in one copy. Haploid cells include cells naturally found in a haploid state, or cells that have been induced to exist in a haploid state (e.g., through specific regulation, alteration, inactivation, activation, or modification of meiosis, cytokinesis, or DNA replication). A haploid cell may refer to a cell whose entire genome is haploid, or it may refer to a cell that is haploid in a particular genomic locus of interest.

[1157] The compositions and systems, and nucleic acid encoding thereof may be introduced to fungi cells using the delivery systems and methods herein. Examples of delivery systems include lithium acetate treatment, bombardment, electroporation, and those described in Kawai et al., 2010, Bioeng Bugs. 2010 November-December; 1(6): 395-403.

[1158] In some examples, a yeast expression vector (e.g., those with one or more regulatory elements) may be used. Examples of such vectors include a centromeric (CEN) sequence, an autonomous replication sequence (ARS), a promoter, such as an RNA Polymerase III promoter, operably linked to a sequence or gene of interest, a terminator such as an RNA polymerase III terminator, an origin of replication, and a marker gene (e.g., auxotrophic, antibiotic, or other selectable markers). Examples of expression vectors for use in yeast may include plasmids, yeast artificial chromosomes, 2 plasmids, yeast integrative plasmids, yeast replicative plasmids, shuttle vectors, and episomal plasmids.

### Biofuel and Materials Production by Fungi

[1159] In some embodiments, the compositions, systems, and methods may be used for generating modified fungi for biofuel and material productions. For instance, the modified fungi for production of biofuel or biopolymers from fermentable sugars and optionally to be able to degrade plant-derived lignocellulose derived from agricultural waste as a source of fermentable sugars. Foreign genes required for biofuel production and synthesis may be introduced in to fungi In some examples, the genes may encode enzymes involved in the conversion of pyruvate to ethanol or another product of interest, degrade cellulose (e.g., cellulase), endogenous metabolic pathways which compete with the biofuel production pathway.

[1160] In some examples, the compositions, systems, and methods may be used for generating and/or selecting yeast strains with improved xylose or cellobiose utilization, isoprenoid biosynthesis, and/or lactic acid production. One or more genes involved in the metabolism and synthesis of these compounds may be modified and/or introduced to yeast cells. Examples of the methods and genes include lactate dehydrogenase, PDC1 and PDC5, and those described in Ha, S. J., et al. (2011) Proc. Natl. Acad. Sci. USA 108(2):504-9 and Galazka, J. M., et al. (2010) Science 330(6000):84-6; Jakociunas T et al., Metab Eng. 2015 March; 28:213-222; Stovicek V, et al., FEMS Yeast Res. 2017 Aug. 1; 17(5).

### Improved Plants and Yeast Cells

[1161] The present disclosure further provides improved plants and fungi. The improved and fungi may comprise one or more genes introduced, and/or one or more genes modified by the compositions, systems, and methods herein. The improved plants and fungi may have increased food or feed production (e.g., higher protein, carbohydrate, nutrient or vitamin levels), oil and biofuel production (e.g., methanol, ethanol), tolerance to pests, herbicides, drought, low or high temperatures, excessive water, etc.

[1162] The plants or fungi may have one or more parts that are improved, e.g., leaves, stems, roots, tubers, seeds, endosperm, ovule, and pollen. The parts may be viable, nonviable, regeneratable, and/or non-regeneratable.

[1163] The improved plants and fungi may include gametes, seeds, embryos, either zygotic or somatic, progeny and/or hybrids of improved plants and fungi. The progeny may be a clone of the produced plant or fungi, or may result from sexual reproduction by crossing with other individuals of the same species to introgress further desirable traits into their offspring. The cell may be in vivo or ex vivo in the cases of multicellular organisms, particularly plants.

### Further Applications of the CRISPR-Cas System in Plants

[1164] Further applications of the compositions, systems, and methods on plants and fungi include visualization of genetic element dynamics (e.g., as described in Chen B, et al., Cell. 2013 Dec. 19; 155(7):1479-91), targeted gene disruption positive-selection in vitro and in vivo (as described in Malina A et al., Genes Dev. 2013 Dec. 1; 27(23):2602-14), epigenetic modification such as using fusion of Cas and histone-modifying enzymes (e.g., as described in Rusk N, Nat Methods. 2014 January; 11(1):28), identifying transcription regulators (e.g., as described in Waldrip Z J, Epigenetics. 2014 September; 9(9):1207-11), anti-virus treatment for both RNA and DNA viruses (e.g., as described in Price A A, et al., Proc Natl Acad Sci USA. 2015 May 12; 112(19):6164-9; Ramanan V et al., Sci Rep. 2015 Jun. 2; 5:10833), alteration of genome complexity such as chromosome numbers (e.g., as described in Karimi-Ashtiyani R et al., Proc Natl Acad Sci USA. 2015 Sep. 8; 112(36):11211-6; Anton T, et al., Nucleus. 2014 March-April; 5(2):163-72), self-cleavage of the CRISPR system for controlled inactivation/activation (e.g., as described Sugano S S et al., Plant Cell Physiol. 2014 March; 55(3):475-81), multiplexed gene editing (as described in Kabadi A M et al., Nucleic Acids Res. 2014 Oct. 29; 42(19):e147), development of kits for multiplex genome editing (as described in Xing H L et al., BMC Plant Biol. 2014 Nov. 29; 14:327), starch production (as described in Hebelstrup K H et al., Front Plant Sci. 2015 Apr. 23; 6:247), targeting multiple genes in a family or pathway (e.g., as described in Ma X et al., Mol Plant. 2015 August; 8(8):1274-84), regulation of non-coding genes and sequences (e.g., as described in Lowder L G, et al., Plant Physiol. 2015 October; 169(2):971-85), editing genes in trees (e.g., as described in Belhaj K et al., Plant Methods. 2013 Oct. 11; 9(1):39; Harrison M M, et al., Genes Dev. 2014 Sep. 1; 28(17):1859-72; Zhou X et al., New Phytol. 2015 October; 208(2):298-301), introduction of mutations for resistance to host-specific pathogens and pests.

[1165] Additional examples of modifications of plants and fungi that may be performed using the compositions, systems, and methods include those described in WO2016/099887, WO2016/025131, WO2016/073433, WO2017/066175, WO2017/100158, WO 2017/105991, WO2017/106414, WO2016/100272, WO2016/100571, WO 2016/100568, WO 2016/100562, and WO 2017/019867.

### Methods of Using the CRISPR-Cas Systems in Non-Human Animals

[1166] The compositions, systems, and methods may be used to study and modify non-human animals, e.g., introducing desirable traits and disease resilience, treating diseases, facilitating breeding, etc. In some embodiments, the compositions, systems, and methods may be used to improve breeding and introducing desired traits, e.g., increasing the frequency of trait-associated alleles, introgression of alleles from other breeds/species without linkage drag, and creation of de novo favorable alleles. Genes and other genetic elements that can be targeted may be screened and identified. Examples of application and approaches include those described in Tait-Burkard C, et al., Livestock 2.0—genome editing for fitter, healthier, and more productive farmed animals. Genome Biol. 2018 Nov. 26; 19(1):204; Lillico S, Agricultural applications of genome editing in farmed animals. Transgenic Res. 2019 August; 28(Suppl 2):57-60; Houston R D, et al., Harnessing genomics to fast-track genetic improvement in aquaculture. Nat Rev Genet. 2020 Apr. 16. doi: 10.1038/s41576-020-0227-y, which are incorporated herein by reference in their entireties. Applications described in other sections such as therapeutic, diagnostic, etc. can also be used on the animals herein.

[1167] The compositions, systems, and methods may be used on animals such as fish, amphibians, reptiles, mammals, and birds. The animals may be farm and agriculture animals, or pets. Examples of farm and agriculture animals include horses, goats, sheep, swine, cattle, llamas, alpacas, and birds, e.g., chickens, turkeys, ducks, and geese. The animals may be a non-human primate, e.g., baboons, capuchin monkeys, chimpanzees, lemurs, macaques, marmosets, tamarins, spider monkeys, squirrel monkeys, and vervet monkeys. Examples of pets include dogs, cats, horses, wolfs, rabbits, ferrets, gerbils, hamsters, chinchillas, fancy rats, guinea pigs, canaries, parakeets, and parrots.

[1168] In some embodiments, one or more genes may be introduced (e.g., overexpressed) in the animals to obtain or enhance one or more desired traits. Growth hormones, insulin-like growth factors (IGF-1) may be introduced to increase the growth of the animals, e.g., pigs or salmon (such as described in Pursel V G et al., J Reprod Fertil Suppl. 1990; 40:235-45; Waltz E, Nature. 2017; 548:148). Fat-1 gene (e.g., from C elegans) may be introduced for production of larger ratio of n-3 to n-6 fatty acids may be induced, e.g. in pigs (such as described in Li M, et al., Genetics. 2018; 8:1747-54). Phytase (e.g., from E coli) xylanase (e.g., from Aspergillus niger), beta-glucanase (e.g., from Bacillus lichenformis) may be introduced to reduce the environmental impact through phosphorous and nitrogen release reduction, e.g. in pigs (such as described in Golovan S P, et al., Nat Biotechnol. 2001; 19:741-5; Zhang X et al., elife. 2018). shRNA decoy may be introduced to induce avian influenza resilience e.g. in chicken (such as described in Lyall et al., Science. 2011; 331:223-6). Lysozyme or lysostaphin may be introduced to induce mastitis resilience e.g., in goat and cow (such as described in Maga E A et al., Foodborne Pathog Dis. 2006; 3:384-92; Wall R J, et al., Nat Biotechnol. 2005; 23:445-51). Histone deacetylase such as HDAC6 may be introduced to induce PRRSV resilience, e.g., in pig (such as described in Lu T., et al., PLoS One. 2017; 12:e0169317). CD163 may be modified (e.g., inactivated or removed) to introduce PRRSV resilience in pigs (such as described in Prather R S et al., Sci Rep. 2017 Oct. 17; 7(1):13371). Similar approaches may be used to inhibit or remove viruses and bacteria (e.g., Swine Influenza Virus (SIV) strains which include influenza C and the subtypes of influenza A known as H1N1, H1N2, H2N1, H3N1, H3N2, and H2N3, as well as pneumonia, meningitis and oedema) that may be transmitted from animals to humans.

[1169] In some embodiments, one or more genes may be modified or edited for disease resistance and production traits. Myostatin (e.g., GDF8) may be modified to increase muscle growth, e.g., in cow, sheep, goat, catfish, and pig (such as described in Crispo M et al., PLoS One. 2015; 10:e0136690; Wang X, et al., Anim Genet. 2018; 49:43-51; Khalil K, et al., Sci Rep. 2017; 7:7301; Kang J-D, et al., RSC Adv. 2017; 7:12541-9). Pc POLLED may be modified to induce horlessness, e.g., in cow (such as described in Carlson D F et al., Nat Biotechnol. 2016; 34:479-81). KISSIR may be modified to induce boretaint (hormone release during sexual maturity leading to undesired meat taste), e.g., in pigs. Dead end protein (dnd) may be modified to induce sterility, e.g., in salmon (such as described in Wargelius A, et al., Sci Rep. 2016; 6:21284). Nano2 and DDX may be modified to induce sterility (e.g., in surrogate hosts), e.g., in pigs and chicken (such as described Park K-E, et al., Sci Rep. 2017; 7:40176; Taylor L et al., Development. 2017; 144:928-34). CD163 may be modified to induce PRRSV resistance, e.g., in pigs (such as described in Whitworth K M, et al., Nat Biotechnol. 2015; 34:20-2). RELA may be modified to induce ASFV resilience, e.g., in pigs (such as described in Lillico S G, et al., Sci Rep. 2016; 6:21645). CD18 may be modified to induce Mannheimia (Pasteurella) haemolytica resilience, e.g., in cows (such as described in Shanthalingam S, et al., roc Natl Acad Sci USA. 2016; 113:13186-90). NRAMP1 may be modified to induce tuberculosis resilience, e.g., in cows (such as described in Gao Y et al., Genome Biol. 2017; 18:13). Endogenous retrovirus genes may be modified or removed for xenotransplantation such as described in Yang L, et al. Science. 2015; 350:1101-4; Niu D et al., Science. 2017; 357:1303-7). Negative regulators of muscle mass (e.g., Myostatin) may be modified (e.g., inactivated) to increase muscle mass, e.g., in dogs (as described in Zou Q et al., J Mol Cell Biol. 2015 December; 7(6):580-3).

[1170] Animals such as pigs with severe combined immunodeficiency (SCID) may generated (e.g., by modifying RAG2) to provide useful models for regenerative medicine, xenotransplantation (discussed also elsewhere herein), and tumor development. Examples of methods and approaches include those described Lee K, et al., Proc Natl Acad Sci USA. 2014 May 20; 111(20):7260-5; and Schomberg et al. FASEB Journal, April 2016; 30(1):Suppl 571.1.

[1171] SNPs in the animals may be modified. Examples of methods and approaches include those described Tan W. et al., Proc Natl Acad Sci USA. 2013 Oct. 8; 110(41):16526-31; Mali P, et al., Science. 2013 Feb. 15; 339(6121):823-6.

[1172] Stem cells (e.g., induced pluripotent stem cells) may be modified and differentiated into desired progeny cells, e.g., as described in Heo Y T et al., Stem Cells Dev. 2015 Feb. 1; 24(3):393-402.

[1173] Profile analysis (such as Igenity) may be performed on animals to screen and identify genetic variations related to economic traits. The genetic variations may be modified to introduce or improve the traits, such as carcass composition, carcass quality, maternal and reproductive traits and average daily gain.

### Multiplex Targeting

[1174] Cas proteins as defined herein can employ more than one RNA guide without losing activity. This enables the use of the CRISPR enzymes, systems or complexes as defined herein for targeting multiple DNA targets, genes or gene loci, with a single enzyme, system or complex as defined herein. The guide RNAs may be tandemly arranged, optionally separated by a nucleotide sequence such as a direct repeat as defined herein. The position of the different guide RNAs is the tandem does not influence the activity.

[1175] In some embodiments, the method includes multiplexed targeting such that multiple targets are targeted by one or more CRISPR-Cas systems. In some embodiments, multiple guides are used to achieve multiplexing and/or more than one CRISPR-Cas system can be used to achieve multiplexing may be used. In some examples, one Cas protein can be included in the system and/or delivered that is associated with or is capable of associating with multiple guides, e.g., at least 2, at least 5, at least 10, at least 15, at least 20, at least 30, at least 40, at least 50, at least 60, at least 70, at least 80, at least 90, at least 100, at least 120, at least 140, at least 160, at least 180, at least 200, at least 220, at least 240, at least 260, at least 280, at least 300, at least 350, at least 400, or at least 500 guides. In some examples, a system herein may comprise a Cas protein and multiple guides, e.g., at least 2, at least 5, at least 10, at least 15, at least 20, at least 30, at least 40, at least 50, at least 60, at least 70, at least 80, at least 90, at least 100, at least 120, at least 140, at least 160, at least 180, at least 200, at least 220, at least 240, at least 260, at least 280, at least 300, at least 350, at least 400, or at least 500 guides.

[1176] In some embodiments, the Cas protein can form a part of a CRISPR-system or complex thereof that includes tandemly arranged guide RNAs (gRNAs) comprising a series of 2, 3, 4, 5, 6, 7, 8, 9, 10, 15, 25, 25, 30, or more than 30 guide sequences, each capable of specifically hybridizing to a target sequence in a genomic locus or other polynucleotide of interest in a e.g., a cell. In some embodiments, the functional CRISPR-Cas system or complex binds to the multiple target sequences. In some embodiments, the CRISPR-Cas system or complex can or is capable of edit(ing) multiple target sequences. The multiple target sequences can be composed of a genomic locus and, in some embodiments, editing may result in an alteration of gene expression. In some embodiments, the method includes altering or modifying expression of multiple gene products by introducing or delivering a CRISPR-Cas system capable of multiplexing to a cell and/or polynucleotide of interest. The method can include introducing into a cell containing said target nucleic acids, e.g., DNA molecules, or containing and expressing target nucleic acid, e.g., DNA molecules; for instance, the target nucleic acids may encode gene products or provide for expression of gene products (e.g. regulatory sequences). In some more specific embodiments, the CRISPR-Cas system used for multiplex targeting includes a deadCas as described in greater detail elsewhere herein. In some embodiments, each of the guide sequence is at least 16, 17, 18, 19, 20, 25 nucleotides, or between 16-30, or between 16-25, or between 16-20 nucleotides in length. Examples of multiplex genome engineering using CRISPR effector proteins are provided in Cong et al. (Science February 15; 339(6121):819-23 (2013) and other publications cited herein.

### Collateral Cas Activity-Based Assays and Uses Thereof

[1177] Cas 12's and/or Cas13's non-specific RNase activity (also referred to as collateral nucleic acid cleavage activity) can be leveraged to cleave reporters upon target recognition, allowing for the design of sensitive and specific diagnostics using a Cas 12 and/or Cas13, including single nucleotide variants, detection based on rRNA sequences, screening for drug resistance, monitoring microbe outbreaks, genetic perturbations, and screening of environmental samples, as described, for example, in PCT/US18/054472 filed Oct. 22, 2018 at [0183]-[0327], incorporated herein by reference. Reference is made to WO 2017/219027, WO2018/107129, US20180298445, US 2018-0274017, US 2018-0305773, WO 2018/170340, U.S. application Ser. No. 15/922,837, filed Mar. 15, 2018 entitled “Devices for CRISPR Effector System Based Diagnostics”, PCT/US18/50091, filed Sep. 7, 2018 “Multi-Effector CRISPR Based Diagnostic Systems”, PCT/US18/66940 filed Dec. 20, 2018 entitled “CRISPR Effector System Based Multiplex Diagnostics”, PCT/US18/054472 filed Oct. 4, 2018 entitled “CRISPR Effector System Based Diagnostic”, U.S. Provisional 62/740,728 filed Oct. 3, 2018 entitled “CRISPR Effector System Based Diagnostics for Hemorrhagic Fever Detection”, U.S. Provisional 62/690,278 filed Jun. 26, 2018 and U.S. Provisional 62/767,059 filed Nov. 14, 2018 both entitled “CRISPR Double Nickase Based Amplification, Compositions, Systems and Methods”, U.S. Provisional 62/690,160 filed Jun. 26, 2018 and U.S. Pat. No. 62,767,077 filed Nov. 14, 2018, both entitled “CRISPR/CAS and Transposase Based Amplification Compositions, Systems, And Methods”, U.S. Provisional 62/690,257 filed Jun. 26, 2018 and 62/767,052 filed Nov. 14, 2018 both entitled “CRISPR Effector System Based Amplification Methods, Systems, And Diagnostics”, U.S. Provisional 62/767,076 filed Nov. 14, 2018 entitled “Multiplexing Highly Evolving Viral Variants With SHERLOCK” and 62/767,070 filed Nov. 14, 2018 entitled “Droplet SHERLOCK.” Reference is further made to WO2017/127807, WO2017/184786, WO 2017/184768, WO 2017/189308, WO 2018/035388, WO 2018/170333, WO 2018/191388, WO 2018/213708, WO 2019/005866, PCT/US18/67328 filed Dec. 21, 2018 entitled “Novel CRISPR Enzymes and Systems”, PCT/US18/67225 filed Dec. 21, 2018 entitled “Novel CRISPR Enzymes and Systems” and PCT/US18/67307 filed Dec. 21, 2018 entitled “Novel CRISPR Enzymes and Systems”, U.S. 62/712,809 filed Jul. 31, 2018 entitled “Novel CRISPR Enzymes and Systems”, U.S. 62/744,080 filed Oct. 10, 2018 entitled “Novel Cas12b Enzymes and Systems” and U.S. 62/751,196 filed Oct. 26 2018 entitled “Novel Cas12b Enzymes and Systems”, U.S. 715,640 filed Aug. 7, 2018 entitled “Novel CRISPR Enzymes and Systems”, WO 2016/205711, U.S. Pat. No. 9,790,490, WO 2016/205749, WO 2016/205764, WO 2017/070605, WO 2017/106657, and WO 2016/149661, WO2018/035387, WO2018/194963, Cox D B T, et al., RNA editing with CRISPR-Cas13, Science. 2017 Nov. 24; 358(6366):1019-1027; Gootenberg J S, et al., Multiplexed and portable nucleic acid detection platform with Cas13, Cas12a, and Csm6, Science. 2018 Apr. 27; 360(6387):439-444; Gootenberg J S, et al., Nucleic acid detection with CRISPR-Cas13a/C2c2, Science. 2017 Apr. 28; 356(6336):438-442; Abudayyeh 00, et al., RNA targeting with CRISPR-Cas13, Nature. 2017 Oct. 12; 550(7675):280-284; Smargon A A, et al., Cas13b Is a Type VI-B CRISPR-Associated RNA-Guided RNase Differentially Regulated by Accessory Proteins Csx27 and Csx28. Mol Cell. 2017 Feb. 16; 65(4):618-630.e7; Abudayyeh 00, et al., C2c2 is a single-component programmable RNA-guided RNA-targeting CRISPR effector, Science. 2016 Aug. 5; 353(6299):aaf5573; Yang L, et al., Engineering and optimizing deaminase fusions for genome editing. Nat Commun. 2016 Nov. 2; 7:13330, Myrvhold et al., Field deployable viral diagnostics using CRISPR-Cas13, Science 2018 360, 444-448, Shmakov et al. “Diversity and evolution of class 2 CRISPR-Cas systems,” Nat Rev Microbiol. 2017 15(3):169-182, each of which is incorporated herein by reference in its entirety.

[1178] In some embodiments, the CRISPR-Cas system or component thereof described herein can be configured for use in a detection assay based on the collateral activity of a Cas 13 and/or a Cas 12 effector. In some embodiments, a Cas 13 or a Cas 12 protein is or is coupled to a small Type II-D Cas protein or variant thereof described elsewhere herein. In some embodiments, the Cas is a Cas 13a, Cas 13b, Cas13c, or Cas13d protein.

[1179] In some embodiments, the detection construct can be configured for a SHERLOCK (Specific High Sensitivity Enzymatic Reporter UnLOCKing) reaction. For ease of reference, these systems may be referred to herein as SHERLOCK systems and the reactions they facilitate as SHERLOCK reactions. See e.g., Kellner et al. Nat. Protoc. 2019. 14(10):2986-3012, International Patent Publications WO 2018/07129, WO 2018/180340, WO 2019/051318, WO 2019/071051, WO 2019/126577; WO 2019/148206, WO 2020/0060067, WO 2020/006049, WO 2020/006036, US Pubs. 2018/0298445, US 2019-0144929, 2018/0305773 Gootenberg et al. 2017, Science. 356:438-442, Gootenberg et al., 2018. Science. 360:439-444, Myhrvold et al. Science. 360:444-448, Jong et al. Point-of-care testing for COVID-19 using SHERLOCK diagnostics. medRxiv 2020.05.04.20091231; doi: https://doi.org/10.1101/2020.05.04.20091231, Abudayyeh et al., CRISPRJ. 2019. 2(3):165-171 which are each incorporated by reference as if expressed in their entirety herein. If a target molecule is present in a sample, the corresponding guide molecule will guide the CRISPR Cas/guide complex to the target molecule by hybridizing with the target molecule, thereby triggering the CRISPR effector protein's nuclease activity. This activated CRISPR effector protein will cleave both the target molecule and then non-specifically cleave the linker portion of the detection construct, resulting in a detectable signal.

[1180] In some embodiments, the method of screening can include contacting a CRISPR-Cas system or component thereof described herein that includes one or more Cas molecules with collateral nucleic acid cleavage activity and configured as previously described to screen for target polynucleotides by leveraging CRISPR-Cas target recognition and Cas protein collateral nucleic acid cleavage activity upon target recognition with a sample containing polynucleotides and detecting one or more detectable signals (or absence thereof) where at least one of the detectable signals (or absence thereof) indicates the presence of a target polynucleotide. In some embodiments, one or more suitable controls are included.

### Devices

[1181] The CRISPR-Cas systems or component(s) thereof described herein can be embodied in/on diagnostic devices, particularly those CRISPR-Cas systems and/or component(s) thereof configured for an assay based upon the collateral polynucleotide cleavage activity of a Cas protein. Such systems and components are described in greater detail elsewhere herein. A number of substrates and configurations of devices capable of defining multiple individual discrete volumes within the device may be used. As used herein “individual discrete volume” refers to a discrete space, such as a container, receptacle, or other arbitrary defined volume or space that can be defined by properties that prevent and/or inhibit migration of target molecules, for example a volume or space defined by physical properties such as walls, for example the walls of a well, tube, or a surface of a droplet, which may be impermeable or semipermeable, or as defined by other means such as chemical, diffusion rate limited, electro-magnetic, or light illumination, or any combination thereof that can contain a target molecule and a indexable nucleic acid identifier (for example nucleic acid barcode). By “diffusion rate limited” (for example diffusion defined volumes) is meant spaces that are only accessible to certain molecules or reactions because diffusion constraints effectively defining a space or volume as would be the case for two parallel laminar streams where diffusion will limit the migration of a target molecule from one stream to the other. By “chemical” defined volume or space is meant spaces where only certain target molecules can exist because of their chemical or molecular properties, such as size, where for example gel beads may exclude certain species from entering the beads but not others, such as by surface charge, matrix size or other physical property of the bead that can allow selection of species that may enter the interior of the bead. By “electro-magnetically” defined volume or space is meant spaces where the electro-magnetic properties of the target molecules or their supports such as charge or magnetic properties can be used to define certain regions in a space such as capturing magnetic particles within a magnetic field or directly on magnets. By “optically” defined volume is meant any region of space that may be defined by illuminating it with visible, ultraviolet, infrared, or other wavelengths of light such that only target molecules within the defined space or volume may be labeled. One advantage to the use of non-walled, or semipermeable discrete volumes is that some reagents, such as buffers, chemical activators, or other agents may be passed through the discrete volume, while other materials, such as target molecules, may be maintained in the discrete volume or space. Typically, a discrete volume will include a fluid medium, (for example, an aqueous solution, an oil, a buffer, and/or a media capable of supporting cell growth) suitable for labeling of the target molecule with the indexable nucleic acid identifier under conditions that permit labeling. Exemplary discrete volumes or spaces useful in the disclosed methods include droplets (for example, microfluidic droplets and/or emulsion droplets), hydrogel beads or other polymer structures (for example poly-ethylene glycol di-acrylate beads or agarose beads), tissue slides (for example, fixed formalin paraffin embedded tissue slides with particular regions, volumes, or spaces defined by chemical, optical, or physical means), microscope slides with regions defined by depositing reagents in ordered arrays or random patterns, tubes (such as, centrifuge tubes, microcentrifuge tubes, test tubes, cuvettes, conical tubes, and the like), bottles (such as glass bottles, plastic bottles, ceramic bottles, Erlenmeyer flasks, scintillation vials and the like), wells (such as wells in a plate), plates, pipettes, or pipette tips among others. In certain embodiments, the compartment is an aqueous droplet in a water-in-oil emulsion. In specific embodiments, any of the applications, methods, or systems described herein requiring exact or uniform volumes may employ the use of an acoustic liquid dispenser.

[1182] In certain example embodiments, the device comprises a flexible material substrate on which a number of spots may be defined. Flexible substrate materials suitable for use in diagnostics and biosensing are known within the art. The flexible substrate materials may be made of plant derived fibers, such as cellulosic fibers, or may be made from flexible polymers such as flexible polyester films and other polymer types. Within each defined spot, reagents of the system described herein are applied to the individual spots. Each spot may contain the same reagents except for a different guide RNA or set of guide RNAs, or where applicable, a different detection aptamer to screen for multiple targets at once. Thus, the systems and devices herein may be able to screen samples from multiple sources (e.g. multiple clinical samples from different individuals) for the presence of the same target, or a limited number of target, or aliquots of a single sample (or multiple samples from the same source) for the presence of multiple different targets in the sample. In certain example embodiments, the elements of the systems described herein are freeze dried onto the paper or cloth substrate. Example flexible material based substrates that may be used in certain example devices are disclosed in Pardee et al. Cell. 2016, 165(5):1255-66 and Pardee et al. Cell. 2014, 159(4):950-54. Suitable flexible material-based substrates for use with biological fluids, including blood are disclosed in International Patent Application Publication No. WO/2013/071301 entitled “Paper based diagnostic test” to Shevkoplyas et al. U.S. Patent Application Publication No. 2011/0111517 entitled “Paper-based microfluidic systems” to Siegel et al. and Shafiee et al. “Paper and Flexible Substrates as Materials for Biosensing Platforms to Detect Multiple Biotargets” Scientific Reports 5:8719 (2015). Further flexible based materials, including those suitable for use in wearable diagnostic devices are disclosed in Wang et al. “Flexible Substrate-Based Devices for Point-of-Care Diagnostics” Cell 34(11):909-21 (2016). Further flexible based materials may include nitrocellulose, polycarbonate, methylethyl cellulose, polyvinylidene fluoride (PVDF), polystyrene, or glass (see e.g., US20120238008). In certain embodiments, discrete volumes are separated by a hydrophobic surface, such as but not limited to wax, photoresist, or solid ink.

[1183] In some embodiments, a dosimeter or badge may be provided that serves as a sensor or indicator such that the wearer is notified of exposure to certain microbes or other agents. For example, the systems described herein may be used to detect a particular pathogen. Likewise, aptamer based embodiments disclosed above may be used to detect both polypeptide as well as other agents, such as chemical agents, to which a specific aptamer may bind. Such a device may be useful for surveillance of soldiers or other military personnel, as well as clinicians, researchers, hospital staff, and the like, in order to provide information relating to exposure to potentially dangerous microbes as quickly as possible, for example for biological or chemical warfare agent detection. In other embodiments, such a surveillance badge may be used for preventing exposure to dangerous microbes or pathogens in immunocompromised patients, burn patients, patients undergoing chemotherapy, children, or elderly individuals.

[1184] Samples sources that may be analyzed using the systems and devices described herein include biological samples of a subject, or environmental samples. Environmental samples may include surfaces or fluids. The biological samples may include, but are not limited to, saliva, blood, plasma, sera, stool, urine, sputum, mucous, lymph, synovial fluid, spinal fluid, cerebrospinal fluid, a swab from skin or a mucosal membrane, or combination thereof. In an example embodiment, the environmental sample is taken from a solid surface, such as a surface used in the preparation of food or other sensitive compositions and materials.

[1185] In other example embodiments, the elements of the systems described herein may be place on a single use substrate, such as swab or cloth that is used to swab a surface or sample fluid. For example, the system could be used to test for the presence of a pathogen on a food by swabbing the surface of a food product, such as a fruit or vegetable. Similarly, the single use substrate may be used to swab other surfaces for detection of certain microbes or agents, such as for use in security screening. Single use substrates may also have applications in forensics, where the CRISPR systems are designed to detect, for example identifying DNA SNPs that may be used to identify a suspect, or certain tissue or cell markers to determine the type of biological matter present in a sample. Likewise, the single use substrate could be used to collect a sample from a patient—such as a saliva sample from the mouth—or a swab of the skin. In other embodiments, a sample or swab may be taken of a meat product on order to detect the presence of absence of contaminants on or within the meat product.

[1186] Near-real-time microbial diagnostics are needed for food, clinical, industrial, and other environmental settings (see e.g., Lu T K, Bowers J, and Koeris M S., Trends Biotechnol. 2013 June; 31(6):325-7). In certain embodiments, the present invention is used for rapid detection of foodborne pathogens using guide RNAs specific to a pathogen (e.g., Campylobacter jejuni, Clostridium perfringens, Salmonella spp., Escherichia coli, Bacillus cereus, Listeria monocytogenes, Shigella spp., Staphylococcus aureus, Staphylococcal enteritis, Streptococcus, Vibrio cholerae, Vibrio parahaemolyticus, Vibrio vulruficus, Yersinia enterocolitica and Yersinia pseudotuberculosis, Brucella spp., Corynebacterium ulcerans, Coxiella burnetii, or Plesiomonas shigelloides).

[1187] In certain embodiments, the device is or comprises a flow strip. For instance, a lateral flow strip allows for RNAse (e.g. C2c2) detection by color. The RNA reporter is modified to have a first molecule (such as for instance FITC) attached to the 5′ end and a second molecule (such as for instance biotin) attached to the 3′ end (or vice versa). The lateral flow strip is designed to have two capture lines with anti-first molecule (e.g. anti-FITC) antibodies hybridized at the first line and anti-second molecule (e.g. anti-biotin) antibodies at the second downstream line. As the e.g. SHERLOCK reaction flows down the strip, uncleaved reporter will bind to anti-first molecule antibodies at the first capture line, while cleaved reporters will liberate the second molecule and allow second molecule binding at the second capture line. Second molecule sandwich antibodies, for instance conjugated to nanoparticles, such as gold nanoparticles, will bind any second molecule at the first or second line and result in a strong readout/signal (e.g. color). As more reporter is cleaved, more signal will accumulate at the second capture line and less signal will appear at the first line. In certain embodiments, the invention relates to the use of a follow strip as described herein for detecting nucleic acids or polypeptides. In certain embodiments, the invention relates to a method for detecting nucleic acids or polypeptides with a flow strip as defined herein, e.g. (lateral) flow tests or (lateral) flow immunochromatographic assays.

[1188] In certain example embodiments, the device is a microfluidic device that generates and/or merges different droplets (i.e. individual discrete volumes). For example, a first set of droplets may be formed containing samples to be screened and a second set of droplets formed containing the elements of the systems described herein. The first and second set of droplets are then merged and then diagnostic methods as described herein are carried out on the merged droplet set. Microfluidic devices disclosed herein may be silicone-based chips and may be fabricated using a variety of techniques, including, but not limited to, hot embossing, molding of elastomers, injection molding, LIGA, soft lithography, silicon fabrication and related thin film processing techniques. Suitable materials for fabricating the microfluidic devices include, but are not limited to, cyclic olefin copolymer (COC), polycarbonate, poly(dimethylsiloxane) (PDMS), and poly(methylacrylate) (PMMA). In one embodiment, soft lithography in PDMS may be used to prepare the microfluidic devices. For example, a mold may be made using photolithography which defines the location of flow channels, valves, and filters within a substrate. The substrate material is poured into a mold and allowed to set to create a stamp. The stamp is then sealed to a solid support, such as but not limited to, glass. Due to the hydrophobic nature of some polymers, such as PDMS, which absorbs some proteins and may inhibit certain biological processes, a passivating agent may be necessary (Schoffner et al. Nucleic Acids Research, 1996, 24:375-379). Suitable passivating agents are known in the art and include, but are not limited to, silanes, parylene, n-Dodecyl-b-D-matoside (DDM), pluronic, Tween-20, other similar surfactants, polyethylene glycol (PEG), albumin, collagen, and other similar proteins and peptides.

[1189] In certain example embodiments, the system and/or device may be adapted for conversion to a flow-cytometry readout in or allow to all of sensitive and quantitative measurements of millions of cells in a single experiment and improve upon existing flow-based methods, such as the PrimeFlow assay. In certain example embodiments, cells may be cast in droplets containing unpolymerized gel monomer, which can then be cast into single-cell droplets suitable for analysis by flow cytometry. A detection construct comprising a fluorescent detectable label may be cast into the droplet comprising unpolymerized gel monomer. Upon polymerization of the gel monomer to form a bead within a droplet. Because gel polymerization is through free-radical formation, the fluorescent reporter becomes covalently bound to the gel. The detection construct may be further modified to comprise a linker, such as an amine. A quencher may be added post-gel formation and will bind via the linker to the reporter construct. Thus, the quencher is not bound to the gel and is free to diffuse away when the reporter is cleaved by the CRISPR effector protein. Amplification of signal in droplet may be achieved by coupling the detection construct to a hybridization chain reaction (HCR initiators) amplification. DNA/RNA hybrid hairpins may be incorporated into the gel which may comprise a hairpin loop that has a RNase sensitive domain. By protecting a strand displacement toehold within a hairpin loop that has a RNase sensitive domain, HCR initiators may be selectively deprotected following cleavage of the hairpin loop by the CRISPR effector protein. Following deprotection of HCR initiators via toehold mediated strand displacement, fluorescent HCR monomers may be washed into the gel to enable signal amplification where the initiators are deprotected.

[1190] An example of microfluidic device that may be used in the context of the invention is described in Hou et al. “Direct Detection and drug-resistance profiling of bacteremias using inertial microfluidics” Lap Chip. 15(10):2297-2307 (2016).

[1191] In systems described herein, may further be incorporated into wearable medical devices that assess biological samples, such as biological fluids, of a subject outside the clinic setting and report the outcome of the assay remotely to a central server accessible by a medical care professional. The device may include the ability to self-sample blood, such as the devices disclosed in U.S. Patent Application Publication No. 2015/0342509 entitled “Needle-free Blood Draw to Peeters et al., U.S. Patent Application Publication No. 2015/0065821 entitled “Nanoparticle Phoresies” to Andrew Conrad.

[1192] In certain example embodiments, the device may comprise individual wells, such as microplate wells. The size of the microplate wells may be the size of standard 6, 24, 96, 384, 1536, 3456, or 9600 sized wells. In certain example embodiments, the elements of the systems described herein may be freeze dried and applied to the surface of the well prior to distribution and use.

[1193] The devices disclosed herein may further comprise inlet and outlet ports, or openings, which in turn may be connected to valves, tubes, channels, chambers, and syringes and/or pumps for the introduction and extraction of fluids into and from the device. The devices may be connected to fluid flow actuators that allow directional movement of fluids within the microfluidic device. Example actuators include, but are not limited to, syringe pumps, mechanically actuated recirculating pumps, electroosmotic pumps, bulbs, bellows, diaphragms, or bubbles intended to force movement of fluids. In certain example embodiments, the devices are connected to controllers with programmable valves that work together to move fluids through the device. In certain example embodiments, the devices are connected to the controllers discussed in further detail below. The devices may be connected to flow actuators, controllers, and sample loading devices by tubing that terminates in metal pins for insertion into inlet ports on the device.

[1194] As shown herein the elements of the system are stable when freeze dried, therefore embodiments that do not require a supporting device are also contemplated, i.e., the system may be applied to any surface or fluid that will support the reactions disclosed herein and allow for detection of a positive detectable signal from that surface or solution. In addition to freeze-drying, the systems may also be stably stored and utilized in a pelletized form. Polymers useful in forming suitable pelletized forms are known in the art.

[1195] In certain embodiments, the CRISPR effector protein is bound to each discrete volume in the device. Each discrete volume may comprise a different guide RNA specific for a different target molecule. In certain embodiments, a sample is exposed to a solid substrate comprising more than one discrete volume each comprising a guide RNA specific for a target molecule. Not being bound by a theory, each guide RNA will capture its target molecule from the sample and the sample does not need to be divided into separate assays. Thus, a valuable sample may be preserved. The effector protein may be a fusion protein comprising an affinity tag. Affinity tags are well known in the art (e.g., HA tag, Myc tag, Flag tag, His tag, biotin). The effector protein may be linked to a biotin molecule and the discrete volumes may comprise streptavidin. In other embodiments, the CRISPR effector protein is bound by an antibody specific for the effector protein. Methods of binding a CRISPR enzyme has been described previously (see, e.g., US20140356867A1).

[1196] The devices disclosed herein may also include elements of point of care (POC) devices known in the art for analyzing samples by other methods. See, for example St John and Price, “Existing and Emerging Technologies for Point-of-Care Testing” (Clin Biochem Rev. 2014 August; 35(3): 155-167).

[1197] The present invention may be used with a wireless lab-on-chip (LOC) diagnostic sensor system (see e.g., U.S. Pat. No. 9,470,699 “Diagnostic radio frequency identification sensors and applications thereof”). In certain embodiments, the present invention is performed in a LOC controlled by a wireless device (e.g., a cell phone, a personal digital assistant (PDA), a tablet) and results are reported to said device.

[1198] Radio frequency identification (RFID) tag systems include an RFID tag that transmits data for reception by an RFID reader (also referred to as an interrogator). In a typical RFID system, individual objects (e.g., store merchandise) are equipped with a relatively small tag that contains a transponder. The transponder has a memory chip that is given a unique electronic product code. The RFID reader emits a signal activating the transponder within the tag through the use of a communication protocol. Accordingly, the RFID reader is capable of reading and writing data to the tag. Additionally, the RFID tag reader processes the data according to the RFID tag system application. Currently, there are passive and active type RFID tags. The passive type RFID tag does not contain an internal power source but is powered by radio frequency signals received from the RFID reader. Alternatively, the active type RFID tag contains an internal power source that enables the active type RFID tag to possess greater transmission ranges and memory capacity. The use of a passive versus an active tag is dependent upon the particular application.

[1199] Lab-on-the chip technology is well described in the scientific literature and consists of multiple microfluidic channels, input or chemical wells. Reactions in wells can be measured using radio frequency identification (RFID) tag technology since conductive leads from RFID electronic chip can be linked directly to each of the test wells. An antenna can be printed or mounted in another layer of the electronic chip or directly on the back of the device. Furthermore, the leads, the antenna and the electronic chip can be embedded into the LOC chip, thereby preventing shorting of the electrodes or electronics. Since LOC allows complex sample separation and analyses, this technology allows LOC tests to be done independently of a complex or expensive reader. Rather a simple wireless device such as a cell phone or a PDA can be used. In one embodiment, the wireless device also controls the separation and control of the microfluidics channels for more complex LOC analyses. In one embodiment, a LED and other electronic measuring or sensing devices are included in the LOC-RFID chip. Not being bound by a theory, this technology is disposable and allows complex tests that require separation and mixing to be performed outside of a laboratory.

[1200] In preferred embodiments, the LOC may be a microfluidic device. The LOC may be a passive chip, wherein the chip is powered and controlled through a wireless device. In certain embodiments, the LOC includes a microfluidic channel for holding reagents and a channel for introducing a sample. In certain embodiments, a signal from the wireless device delivers power to the LOC and activates mixing of the sample and assay reagents. Specifically, in the case of the present invention, the system may include a masking agent, CRISPR effector protein, and guide RNAs specific for a target molecule. Upon activation of the LOC, the microfluidic device may mix the sample and assay reagents. Upon mixing, a sensor detects a signal and transmits the results to the wireless device. In certain embodiments, the unmasking agent is a conductive RNA molecule. The conductive RNA molecule may be attached to the conductive material. Conductive molecules can be conductive nanoparticles, conductive proteins, metal particles that are attached to the protein or latex or other beads that are conductive. In certain embodiments, if DNA or RNA is used then the conductive molecules can be attached directly to the matching DNA or RNA strands. The release of the conductive molecules may be detected across a sensor. The assay may be a one step process.

[1201] Since the electrical conductivity of the surface area can be measured precisely quantitative results are possible on the disposable wireless RFID electro-assays. Furthermore, the test area can be very small allowing for more tests to be done in a given area and therefore resulting in cost savings. In certain embodiments, separate sensors each associated with a different CRISPR effector protein and guide RNA immobilized to a sensor are used to detect multiple target molecules. Not being bound by a theory, activation of different sensors may be distinguished by the wireless device.

[1202] In addition to the conductive methods described herein, other methods may be used that rely on RFID or Bluetooth as the basic low cost communication and power platform for a disposable RFID assay. For example, optical means may be used to assess the presence and level of a given target molecule. In certain embodiments, an optical sensor detects unmasking of a fluorescent masking agent.

[1203] In certain embodiments, the device of the present invention may include handheld portable devices for diagnostic reading of an assay (see e.g., Vashist et al., Commercial Smartphone-Based Devices and Smart Applications for Personalized Healthcare Monitoring and Management, Diagnostics 2014, 4(3), 104-128; mReader from Mobile Assay; and Holomic Rapid Diagnostic Test Reader).

[1204] As noted herein, certain embodiments allow detection via colorimetric change which has certain attendant benefits when embodiments are utilized in POC situations and or in resource poor environments where access to more complex detection equipment to readout the signal may be limited. However, portable embodiments disclosed herein may also be coupled with hand-held spectrophotometers that enable detection of signals outside the visible range. An example of a hand-held spectrophotometer device that may be used in combination with the present invention is described in Das et al. “Ultra-portable, wireless smartphone spectrophotometer for rapid, non-destructive testing of fruit ripeness.” Nature Scientific Reports. 2016, 6:32504, DOI: 10.1038/srep32504. Finally, in certain embodiments utilizing quantum dot-based masking constructs, use of a hand-held UV light, or other suitable device, may be successfully used to detect a signal owing to the near complete quantum yield provided by quantum dots.

[1205] In some embodiments, the device is a lateral flow device. In some embodiments, the lateral flow device can be composed of a CRISPR system and detection construct described elsewhere herein and a lateral flow substrate for carrying out the detection reaction and/or nucleic acid release from the sample.

[1206] In some embodiments, the embodiments disclosed herein are directed to a nucleic acid detection system comprising a CRISPR system, one or more guide RNAs designed to bind to corresponding target molecules, a reporter construct (also referred to herein as a detection construct in this context), and optional amplification reagents (discussed in greater detail elsewhere herein) to amplify target nucleic acid molecules and/or detectable signals in a sample. The reporter construct is a molecule that comprises an oligonucleotide component (DNA or RNA) that can be cleaved by an activated CRISPR effector protein. The composition of the oligonucleotide component may be generic i.e. not the same as a target molecule. The reporter construct is configured so that it prevents or masks generation of a detectable positive signal when in the uncleaved configuration, but allows or facilitates generation of a positive detectable signal when cleaved. In the context of the present invention, reporting constructs comprising a first molecule and a second molecule connected by an RNA or DNA nucleic acid linker. Use of an RNA or DNA linker will depend on whether the CRISPR effector protein(s) used have RNA or DNA collateral activity. The first and second molecule are generally part of a binding pair, where the other binding partner is affixed to the lateral flow substrate as described in further detail below. The systems further comprise a detection agent that specifically binds the second molecule and further comprises a detectable label. For ease of reference, these systems may be referred to herein as SHERLOCK systems and the reactions they facilitate as SHERLOCK reactions. The same principles as discussed in connection with SHERLOCK reactions can be applied to other CRISPR-Cas systems with similar targeting and collateral polynucleotide cleavage activities. If a target molecule is present in a sample, the corresponding guide molecule will guide the CRISPR Cas/guide complex to the target molecule by hybridizing with the target molecule, thereby triggering the CRISPR effector protein's nuclease activity. This activated CRISPR effector protein will cleave both the target molecule and then non-specifically cleave the linker portion of the RNA construct.

[1207] In some embodiments, the device can include a lateral flow substrate for detecting a SHERLOCK reaction. Substrates suitable for use in lateral flow assays are known in the art. These may include, but are not necessarily limited to, membranes or pads made of cellulose and/or glass fiber, polyesters, nitrocellulose, or absorbent pads (J Saudi Chem Soc 19(6):689-705; 2015). The SHERLOCK system, i.e., one or more CRISPR systems and corresponding reporter constructs are added to the lateral flow substrate at a defined reagent portion of the lateral flow substrate, typically on one end of the lateral flow substrate. Reporting constructs used within the context of the present invention comprise a first molecule and a second molecule linked by an RNA or DNA linker. The lateral flow substrate further comprises a sample portion. The sample portion may be equivalent to, continuous with, or adjacent to the reagent portion. The lateral flow strip further comprises a first capture line, typically a horizontal line running across the device, but other configurations are possible. The first capture region is proximate to and on the same end of the lateral flow substrate as the sample loading portion. A first binding agent that specifically binds the first molecule of the reporter construct is fixed or otherwise immobilized to the fist capture region. The second capture region is located towards the opposite end of the lateral flow substrate from the first binding region. A second binding agent is fixed or otherwise immobilized at the second capture region. The second binding agent specifically binds the second molecule of the reporter construct, or the second binding agent may bind a detectable ligand. For example, the detectable ligand may be a particle, such as a colloidal particle, that when it aggregates can be detected visually. The particle may be modified with an antibody that specifically binds the second molecule on the reporter construct. If the reporter construct is not cleaved it will facilitate accumulation of the detectable ligand at the first binding region. If the reporter construct is cleaved the detectable ligand is released to flow to the second binding region. In such an embodiment, the second binding agent is an agent capable of specifically or non-specifically binding the detectable ligand on the antibody on the detectable ligand. Examples of suitable binding agents for such an embodiment include, but are not limited to, protein A and protein G.

[1208] Lateral support substrates may be located within a housing (see for example, “Rapid Lateral Flow Test Strips” Merck Millipore 2013). The housing may comprise at least one opening for loading samples and a second single opening or separate openings that allow for reading of detectable signal generated at the first and second capture regions.

[1209] The SHERLOCK system may be freeze-dried to the lateral flow substrate and packaged as a ready to use device, or the SHERLOCK system may be added to the reagent portion of the lateral flow substrate at the time of using the device. Samples to be screened are loaded at the sample loading portion of the lateral flow substrate. The samples must be liquid samples or samples dissolved in an appropriate solvent, usually aqueous. The liquid sample reconstitutes the SHERLOCK reagents such that a SHERLOCK reaction can occur. The liquid sample begins to flow from the sample portion of the substrate towards the first and second capture regions. Intact reporter construct is bound at the first capture region by binding between the first binding agent and the first molecule. Likewise, the detection agent will begin to collect at the first binding region by binding to the second molecule on the intact reporter construct. If target molecule(s) are present in the sample, the CRISPR effector protein collateral effect is activated. As activated CRISPR effector protein comes into contact with the bound reporter construct, the reporter constructs are cleaved, releasing the second molecule to flow further down the lateral flow substrate towards the second binding region. The released second molecule is then captured at the second capture region by binding to the second binding agent, where additional detection agent may also accumulate by binding to the second molecule. Accordingly, if the target molecule(s) is not present in the sample, a detectable signal will appear at the first capture region, and if the target molecule(s) is present in the sample, a detectable signal will appear at the location of the second capture region.

[1210] Specific binding-integrating molecules comprise any members of binding pairs that can be used in the present invention. Such binding pairs are known to those skilled in the art and include, but are not limited to, antibody-antigen pairs, enzyme-substrate pairs, receptor-ligand pairs, and streptavidin-biotin. In addition to such known binding pairs, novel binding pairs may be specifically designed. A characteristic of binding pairs is the binding between the two members of the binding pair.

[1211] Oligonucleotide Linkers having molecules on either end may comprise DNA if the CRISPR effector protein has DNA collateral activity (Cpf1 and C2c1) or RNA if the CRISPR effector protein has RNA collateral activity. Oligonucleotide linkers may be single stranded or double stranded, and in certain embodiments, they could contain both RNA and DNA regions. Oligonucleotide linkers may be of varying lengths, such as 5-10 nucleotides, 10-20 nucleotides, 20-50 nucleotides, or more.

[1212] In some embodiments, the polypeptide identifier elements include affinity tags, such as hemagglutinin (HA) tags, Myc tags, FLAG tags, V5 tags, chitin binding protein (CBP) tags, maltose-binding protein (MBP) tags, GST tags, poly-His tags, and fluorescent proteins (for example, green fluorescent protein (GFP), yellow fluorescent protein (YFP), cyan fluorescent protein (CFP), dsRed, mCherry, Kaede, Kindling, and derivatives thereof, FLAG tags, Myc tags, AU1 tags, T7 tags, OLLAS tags, Glu-Glu tags, VSV tags, or a combination thereof. Other Affinity tags are well known in the art. Such labels can be detected and/or isolated using methods known in the art (for example, by using specific binding agents, such as antibodies, that recognize a particular affinity tag). Such specific binding agents (for example, antibodies) can further contain, for example, detectable labels, such as isotope labels and/or nucleic acid barcodes such as those described herein.

[1213] For instance, a lateral flow strip allows for RNAse (e.g., Cas13a) detection by color. The RNA reporter is modified to have a first molecule (such as for instance FITC) attached to the 5′ end and a second molecule (such as for instance biotin) attached to the 3′ end (or vice versa). The lateral flow strip is designed to have two capture lines with anti-first molecule (e.g., anti-FITC) antibodies hybridized at the first line and anti-second molecule (e.g. anti-biotin) antibodies at the second downstream line. As the SHERLOCK reaction flows down the strip, uncleaved reporter will bind to anti-first molecule antibodies at the first capture line, while cleaved reporters will liberate the second molecule and allow second molecule binding at the second capture line. Second molecule sandwich antibodies, for instance conjugated to nanoparticles, such as gold nanoparticles, will bind any second molecule at the first or second line and result in a strong readout/signal (e.g., color). As more reporter is cleaved, more signal will accumulate at the second capture line and less signal will appear at the first line. In certain embodiments, the invention relates to the use of a follow strip as described herein for detecting nucleic acids or polypeptides. In certain embodiments, the invention relates to a method for detecting nucleic acids or polypeptides with a flow strip as defined herein, e.g. (lateral) flow tests or (lateral) flow immunochromatographic assays.

[1214] In certain example embodiments, a lateral flow device comprises a lateral flow substrate comprising a first end for application of a sample. The first region is loaded with a detectable ligand, such as those disclosed herein, for example a gold nanoparticle. The gold nanoparticle may be modified with a first antibody, such as an anti-FITC antibody. The first region also comprises a detection construct. In one example embodiment, a RNA detection construct and a CRISPR effector system (a CRISPR effector protein and one or more guide sequences configured to bind to one or more target sequences) as disclosed herein. In one example embodiment, and for purposes of further illustration, the RNA construct may comprise a FAM molecule on a first end of the detection construction and a biotin on a second end of the detection construct. Upstream of the flow of solution from the first end of the lateral flow substrate is a first test band. The test band may comprise a biotin ligand. Accordingly, when the RNA detection construct is present it its initial state, i.e. in the absence of target, the FAM molecule on the first end will bind the anti-FITC antibody on the gold nanoparticle, and the biotin on the second end of the RNA construct will bind the biotin ligand allowing for the detectable ligand to accumulate at the first test, generating a detectable signal. Generation of a detectable signal at the first band indicate the absence of the target ligand. In the presence of target, the CRISPR effector complex forms and the CRISPR effector protein is activated resulting in cleavage of the RND detection construct. In the absence of intact RNA detection construct the colloidal gold will flow past the second strip. The lateral flow device may comprise a second band, upstream of the first band. The second band may comprise a molecule capable of binding the antibody-labeled colloidal gold molecule, for example an anti-rabbit antibody capable of binding a rabbit anti-FTIC antibody on the colloidal gold. Therefore, in the presence of one or more targets, the detectable ligand will accumulate at the second band, indicating the presence of the one or more targets in the sample. See also WO 2019/071051, which is incorporated by reference herein.

### Knock-Out Screening

[1215] The Cas proteins and systems described herein can be used to perform efficient and cost effective functional genomic screens. Such screens can utilize CRISPR-Cas genome wide libraries. Such screens and libraries can provide for determining the function of genes, cellular pathways genes are involved in, and how any alteration in gene expression can result in a particular biological process. An advantage of the present invention is that the system avoids off-target binding and its resulting side effects. This is achieved using systems arranged to have a high degree of sequence specificity for the target DNA.

[1216] A genome wide library may comprise a plurality of system guide RNAs, as described herein, comprising guide sequences that are capable of targeting a plurality of target sequences in a plurality of genomic loci in a population of eukaryotic cells. The population of cells may be a population of embryonic stem (ES) cells. The target sequence in the genomic locus may be a non-coding sequence. The non-coding sequence may be an intron, regulatory sequence, splice site, 3′ UTR, 5′ UTR, or polyadenylation signal. Gene function of one or more gene products may be altered by said targeting. The targeting may result in a knockout of gene function. The targeting of a gene product may comprise more than one guide RNA. A gene product may be targeted by 2, 3, 4, 5, 6, 7, 8, 9, or 10 guide RNAs, preferably 3 to 4 per gene. Off-target modifications may be minimized (See, e.g., DNA targeting specificity of RNA-guided Cas9 nucleases. Hsu, P., Scott, D., Weinstein, J., Ran, FA., Konermann, S., Agarwala, V., Li, Y., Fine, E., Wu, X., Shalem, O., Cradick, T J., Marraffini, LA., Bao, G., & Zhang, F. Nat Biotechnol doi:10.1038/nbt.2647 (2013)), incorporated herein by reference and can be adipated for use with the small Type II-D Cas proteins and systems of the present invention. The targeting may be of about 100 or more sequences. The targeting may be of about 1000 or more sequences. The targeting may be of about 20,000 or more sequences. The targeting may be of the entire genome. The targeting may be of a panel of target sequences focused on a relevant or desirable pathway. The pathway may be an immune pathway. The pathway may be a cell division pathway.

[1217] One aspect of the invention comprehends a genome wide library that may comprise a plurality of system guide RNAs that may comprise guide sequences that are capable of targeting a plurality of target sequences in a plurality of genomic loci, wherein said targeting results in a knockout of gene function. This library may potentially comprise guide RNAs that target each and every gene in the genome of an organism.

[1218] In some embodiments of the invention the organism or subject is a eukaryote (including mammal including human) or a non-human eukaryote or a non-human animal or a non-human mammal. In some embodiments, the organism or subject is a non-human animal, and may be an arthropod, for example, an insect, or may be a nematode. In some methods of the invention the organism or subject is a plant. In some methods of the invention the organism or subject is a mammal or a non-human mammal. A non-human mammal may be for example a rodent (preferably a mouse or a rat), an ungulate, or a primate. In some methods of the invention the organism or subject is algae, including microalgae, or is a fungus.

[1219] The knockout of gene function may comprise introducing into each cell in the population of cells a vector system of one or more vectors comprising an engineered, non-naturally occurring system comprising. a Cas protein and one or more guide RNAs, wherein the components may be same or on different vectors of the system, integrating the components into each cell, wherein the guide sequence targets a unique gene in each cell, wherein the Cas protein is operably linked to a regulatory element, wherein when transcribed, the guide RNA comprising the guide sequence directs sequence-specific binding of a system to a target sequence in the genomic loci of the unique gene, inducing cleavage of the genomic loci by the Cas protein, and confirming different knockout mutations in a plurality of unique genes in each cell of the population of cells thereby generating a gene knockout cell library. The invention comprehends that the population of cells is a population of eukaryotic cells, and in a preferred embodiment, the population of cells is a population of embryonic stem (ES) cells.

[1220] The one or more vectors may be plasmid vectors. The vector may be a single vector comprising Cas, a sgRNA, and optionally, a selection marker into target cells. Not being bound by a theory, the ability to simultaneously deliver a Cas and sgRNA through a single vector enables application to any cell type of interest, without the need to first generate cell lines that express Cas. The regulatory element may be an inducible promoter. The inducible promoter may be a doxycycline inducible promoter. In some methods of the invention the expression of the guide sequence is under the control of the T7 promoter and is driven by the expression of T7 polymerase. The confirming of different knockout mutations may be by whole exome sequencing. The knockout mutation may be achieved in 100 or more unique genes. The knockout mutation may be achieved in 1000 or more unique genes. The knockout mutation may be achieved in 20,000 or more unique genes. The knockout mutation may be achieved in the entire genome. The knockout of gene function may be achieved in a plurality of unique genes which function in a particular physiological pathway or condition. The pathway or condition may be an immune pathway or condition. The pathway or condition may be a cell division pathway or condition.

[1221] The invention also provides kits that comprise the genome wide libraries mentioned herein. The kit may comprise a single container comprising vectors or plasmids comprising the library of the invention. The kit may also comprise a panel comprising a selection of unique system guide RNAs comprising guide sequences from the library of the invention, wherein the selection is indicative of a particular physiological condition. The invention comprehends that the targeting is of about 100 or more sequences, about 1000 or more sequences or about 20,000 or more sequences or the entire genome. Furthermore, a panel of target sequences may be focused on a relevant or desirable pathway, such as an immune pathway or cell division.

### EXAMPLES

### Example 1—Exemplary Type II-D Cas Proteins

[1222] Exemplary loci for Type II-D Cas proteins and systems and components thereof are shown in FIG. 1. Relevant nucleotide sequences and features are shown and described in e.g., Appendix A and Appendix B of the U.S. Provisional Application Ser. No. 62/962,672, SEQ ID NOs.: 31-133, and Tables 13-15. Exemplary Type II-D Small Cas proteins can be demonstrated in this Example. Such exemplary Cas proteins are referred to in this Example “Small Cas9” (see e.g., Appendix B of U.S. Provisional Application Ser. No. 62/962,672, which is incorporated by reference as if expressed in its entirety herein and SEQ ID NOs. 93-133 and Table 15) and “IntCas9(s)” (see e.g., Appendix A of U.S. Provisional Application Ser. No. 62/962,672, which is incorporated by reference as if expressed in its entirety herein and SEQ ID NOs. 80-92 and Tables 13-14). In other words, both the “Small Cas9” and “IntCas9” proteins and encoding polynucleotides of this Example can be demonstrative of the Type II-D small Cas proteins of the present invention described and provided elsewhere herein. The Small Cas9 and IntCas9(s) demonstrated in this Example are about 950 amino acids or less in size. The exemplary IntCas9s have sizes from 650-776 amino acids (see e.g., Appendix A of U.S. Provisional Application Ser. No. 62/962,672, which is incorporated by reference as if expressed in its entirety herein and SEQ ID NOS. 80-92 and Tables 13-14). The exemplary Small Cas9s (see e.g., Appendix B) are about 950 amino acids or less.

[1223] Relevant polynucleotide sequences corresponding to the exemplary Type II-D Small Cas9s and ntCas9s, DR (direct repeats), and TracrRNAs are shown in Tables 13-15 and SEQ ID NOS: 31-133 as shown below and in Appendices A and B to the specification of U.S. Provisional Application Ser. No. 62/962,672, which are incorporated by reference as if expressed in its entirety herein.

[1224] The loci for the IntCas9s (about 650-700 amino acids) have a strong CRISPR association and TracrRNA association. The DR length is variable and was between about 29 base pairs and 36 base pairs. IntCas9s were not associated with Cas1, Cas2, Cas4, or Csn2.

TABLE 13
Polynucleotide Sequences Corresponding to Exemplary Type II-D IntCas9,
DR, and TracrRNA

| Sequence | | | | | |
|---|---|---|---|---|---|
| Name | Name | Sequence | Minimum | Maximum | Length |
| 0114922_{—} | IntCas9 | ATGCCGCCCGGATTTTCCTTGTCGACGCCCGGGCGCGGCCGTA | 738 | 2730 | 1993 |
| 10016519 | | TGCTCCCAACTCATGGTGGCCAACGCCCTGGGGATAGACTTGG | | | |
| | | GCGGCAAGGCAGTGGGGCTTGCTGTGCTGGAGCGACCGGGCA | | | |
| | | ACCGCGTCCTGTGGTGCGGAACGGTCCACCTCTCCGACAAGAT | | | |
| | | CAAGGATCTCTACGACCAGCGGCGGACGCTGCGCCGGGCGCG | | | |
| | | CCGGGGCCGCGGGCGCTACCGCAAGCCGAAGGTCCCCCAGCG | | | |
| | | AGGCGGAGGATCGGCGGGCCAGACCCAGTGGAGCGGCTTCCG | | | |
| | | CTACCGGCGCGCCAAGGGCCTCAACCAGTCCCTCCGAACCAAG | | | |
| | | TGCAAGTACGTCGATCCCGACACGGGCGAGGTCTGCGGAAGG | | | |
| | | AACACGGCGAAGCGCTCCAATGTCCGGCATCTTTTCCTGGAGG | | | |
| | | ACATCCTCGGCTTCGCGCCGTTCTCGGACGTCCCGGCCGACTA | | | |
| | | CAAGCAGGCCATCCGCGACGTGCTGGCGTCGAGGGAAGGCAT | | | |
| | | CGCAACGCGGAAGCAGCGCCTCGCGGCCGTCCTGAGCCGGAT | | | |
| | | CGACGTGGACCGGTACCTCAAGAAGCAGATCACGGAGATCTG | | | |
| | | CTTCGACGAGCGCGGGGGACGCGCGGAGTTCTGCCGGGACCA | | | |
| | | CATCCCCGCCCGCCACACGCAGACCGCCATCCCCACGCAGGCC | | | |
| | | GTCTGGCTCCCCCCGTCCATTCGGATCAAGCAGGACTTCCTCCT | | | |
| | | CAAGCATGTCCGCCAACTTGCCGCCAGCGTCCGCATCGACCGC | | | |
| | | ATCGTCATCGAGCGCGCCAACTTCGACCTCCAGAAGATCGCGA | | | |
| | | AGGGAGTGATCGACGATCCCGCGGAGTACCAGCAGGGCGCCC | | | |
| | | GGTACGGCTTCCGCAACACGCGGATGGCCCTCATGCAGGAGTA | | | |
| | | CGGCGCCCGTTGCTGCTACTGCGGCAAGAGCGTCGTCGGCGAG | | | |
| | | AAGTGGCACGTGGACCACATCGACCCGCGGCGTACGGGCGAG | | | |
| | | ACGAACCGCTGGAACAACCTCGCCATCGCCTGCGAGAAGTGC | | | |
| | | AACCACAAGAAAGGCGGGCGGACGCCCCTCGATGCGGGCATG | | | |
| | | GCCTTCGCCGTGGTCGGCGAGACCGTCGCCGGCCGGCGCATCC | | | |
| | | GGCGCCGGCTGGAGCCCAAGCCGCTCGCCGGAAGCCGTATCA | | | |
| | | ACAAGTACATGACGCAGACCGACCAGGGCATCCGGATCCTCA | | | |
| | | AGCGCTCCCTCGCCGAGATCGTCCCCGGCGCGCCCATCGAGGA | | | |
| | | GACCTACGGCTACGTGACGAGCGCCTGGCGGGACCTGTGGGG | | | |
| | | CCTGGAGAAGGGCAGGGAGAAGCAGGAGCACCACAACGACG | | | |
| | | CGATCGTCATCGCCTCCCTGCGCGAAGTTGCCGCCGTCCCCAT | | | |
| | | CGTCGAGGTCTCACCGCAGGCGATCCGGCAGACCGTCGGCGG | | | |
| | | CAAGCGCCTCTTCGACCTCAACCCCGTCCAGCGCGCGCGCGAC | | | |
| | | GCGAAGTACTACCAGCGCGGCCCGGTGGTCGCGGAGGTCGGC | | | |
| | | GGGATCGCGCCGGCCCAACTGCCTGCGGTCGTGGACGAGCGC | | | |
| | | AAACGCAAGCTGCTCGCCCGCGAGTTCGCTCGCTACGGCGTCA | | | |
| | | CGGGCAGGAAGCCGCTGCCGCCGCCGGCGCTGGATCGCCTCCC | | | |
| | | CTTCAAGAGCGTCCGCCTCCGCAAGCGCGACTGCACGGATGCC | | | |
| | | AACGTGCGTCGGATGGCGACGGGCCACCGCTTCAAGCTCAGC | | | |
| | | AACCCCGGCGGCACGCGCGTCAACCAGGCCGTCGTCGTGTATC | | | |
| | | TCACGTCCGCTGGCAAGCGGGCGTCCTACGCCGTCAAGAACAC | | | |
| | | CCGGGCCTTCGGCCCGACGGCGCCGCCCGACGACCTCGACCGC | | | |
| | | GAGCTGTGGCGCTTCCGCCCGGGAGATGCGGTCGCCGATCGGG | | | |
| | | ACGGCGGCGCGATCGGGCGCGTCGTCAAGCTCGGCAGCGACG | | | |
| | | GGACGCTGACACTCGATTCCGGCAAGACACGAAAGGCACACA | | | |
| | | CGTGCAGCAAGGGAGGTGGTCGAATGACCACGAGCTAG (SEQ | | | |
| | | ID NO: 31) | | | |
| | Tracr | GAGGTCAGAAGCAGCCAGAGCGAAGGCCCCCGATGGGGCCTG | 3418 | 3598 | 181 |
| | | CCAGGGAACCCAACGAAAGGCGGGACCTGGCCAGCAGCTACG | | | |
| | | TTTGCAGGAAAGGTCAAGACCTATGCCGGGATGTAGTGATCTC | | | |
| | | GTCTACCCAGTCCCGGCCTCTTGGAGTCTCGACCCGGAAGATC | | | |
| | | AACGCCCCAGC (SEQ ID NO: 32) | | | |
| | DR | ATTCTGGCCTCTCGCGGGCGTGGGACGATG (SEQ ID NO: 33) | 3162 | 3191 | 30 |
| | DR | CGCGAGGCCTCGCCTGCGTGGGACGATC (SEQ ID NO: 34) | 2735 | 2762 | 28 |
| | DR | ATTCTGGCCTCGCGGGCGTGGGACGATG (SEQ ID NO: 35) | 2796 | 2823 | 28 |
| | DR | ATTCTGGCCTCGCGGGCGTGGGACGATG (SEQ ID NO: 35) | 2857 | 2884 | 28 |
| | DR | ATTCTCGCCTCGCGGGCGTGGGACGATG (SEQ ID NO: 35) | 2918 | 2945 | 28 |
| | DR | ATTCTGGCCTCGCGGGCGTGGGACGATG (SEQ ID NO: 35) | 2979 | 3006 | 28 |
| | DR | ATTCTGGCCTCGCGGGCGTGGGACGATG (SEQ ID NO: 35) | 3040 | 3067 | 28 |
| | DR | ATTCTGGCCTCGCGGGCGTGGGACGATG (SEQ ID NO: 35) | 3101 | 3128 | 28 |
| | DR | ATTCTGGGCTCGCGGGCGTGGGACGATG (SEQ ID NO: 36) | 3225 | 3252 | 28 |
| | DR | ATTCTGGGCTCGCGGGCGTGGGACGATG (SEQ ID NO: 36) | 3287 | 3314 | 28 |
| 0209343_{—} | IntCas9 | ATGCAAGGACAAAAACTTGGTATAGATTTAGGCGGTAAGCAT | 4415 | 6391 | 1977 |
| 10010378 | | GTCGGTCTTGCTGTTGTAAGAACACCGATAAACGAGGTGGCAC | | | |
| | | ATTACTGCACTATTGAACTCAGAGAAGACATTAAGGATAAGAT | | | |
| | | GGATGAGAGGAGGTCTCTTCGGAGGGCGAGGAGAAACAGGCT | | | |
| | | CTGGCATAGGGAAGCGAGGTTTGACAATAGGCAATTAAGGGT | | | |
| | | GAAATGCAAATATATTGATAAAGATACAGGCGAAATCTGCGG | | | |
| | | AGCTAATACTCCAAAGAAATCCAATGTAAAACATCTTCTACTT | | | |
| | | GAGAATATACTCGTCAATCTTAAAATAGCTGATGAATCTAAAG | | | |
| | | AGGAAATCAGAAGAAGAGGGCTGGACAGAGACACAAACAAA | | | |
| | | AGTGAATTACAGACAATCCTTGAGAAATTTTCAATAAATACCT | | | |
| | | TCCTGAAAAAACAGATTAAAGACATCATTCTTGAAAAGGGGG | | | |
| | | AAGGGAGGGCTGTCTTTTGCAGAGAGCATATCCCCTTTCATTA | | | |
| | | TGAACAGGTTGCAACAGAGGCTGAGAGTTTCTGGCTGTCAAAT | | | |
| | | TCAATAAGGGCTAAACAGGACCAGATACTCTCCCGCCTTAAAA | | | |
| | | GAATAGCAAAGGATTTTAAGATAGATGAGGTGGTTATTGAAA | | | |
| | | GGGCGAACTTTGATTTGCAAAAGCTCCAGAGACCTGATGAGAT | | | |
| | | AGAAGCACCTGAAGATTACATGAAGGGTCCTAACTTCGGGCA | | | |
| | | CAGAAACAGGTTTGAGGCATTGAAGCAGGAATATGGCAACCG | | | |
| | | ATGCTGTTTCTGCGGAAAGAAGGGTGGAGATGAAGTAAAGCT | | | |
| | | GAAGATAGGGCATCTCTATCCGAAGGCTAAAGATGAGATAAA | | | |
| | | CAGGTGGGAAAACCTTATAACTATATGTGAAAAATGTAATGCG | | | |
| | | AAGCAGGGTAAAAGGACACCAGAGGAGGCAGGGATGGAATTT | | | |
| | | GTAATTGTAAAGGAGAAGGTTTTTAATCCTGCAGCAGGAAGG | | | |
| | | GTAATACCCATAAAAAGAGAACTCAAGCCGAAGCCCATAAAT | | | |
| | | GAATCAAAGGTTAATAAATATATGACCCATACTGATATTGGCA | | | |
| | | TAAGGAGGCTCAAAAGAGAAATCCAGAATATTTTTGGAAGCA | | | |
| | | TACCTATAAGAGAAACATACGGCTATATCACATCGTATTTTAG | | | |
| | | AAATAAATGGGAGCTTGAAAAAGAACATTATAATGATGCTGT | | | |
| | | AGTCATAGCCTCTGACAAAGAAGATTTGAATATAAAACCTGTA | | | |
| | | TTTAAAGATGCAGTCCCTCAGACAATTAAATCATCTATCAAGG | | | |
| | | GCGGGAAACTCTTTGATACAAATCCCCTCCAGTTTAGTGATGG | | | |
| | | AAAGTTTTACCAGAACATAACCCTTATAGGCAGAAAGGCAGG | | | |
| | | GATGCGTTCATCAAAACATAAAAGGGGTCAGAGGAATATCAG | | | |
| | | GAACTATGGCTCAATTTATATGGATGAGATTGAACTTATAACC | | | |
| | | TCAGAATGGAAGAAAAAGGTTCTCTGCGAATTAAGAGATAAA | | | |
| | | CTTGGTTATGTAAAAGGAGATAAGAATAAGTCTTTTAAGCCTG | | | |
| | | AGGAACTGATGAATGCAAATCTGCCTTTCAGGACTGTAACTAT | | | |
| | | TGACAAAAGGGGTGTAGGAGAATCTTCAACCCGCTTAATCAAT | | | |
| | | AACAATGTATTCCGTGCCTCAGCTGAAGTAAATACGCATATAA | | | |
| | | TGGTCTATTCAAATAATGACGGTAGAATGAAGGCATTTGCAGT | | | |
| | | AAAAAATCCTAAGATATTTAAAGATGCCGGACTCCCTCATGAT | | | |
| | | TTTCAAAAAAAGATATTCATTGTAAAAAAGGGGGATATTGTTA | | | |
| | | CATGGAAAAAAAGTGAAGATGGAATTGCCGTAACAGGCAGGG | | | |
| | | TGACCAAATGTTTGACAAAAAATGGGGTAATTGATATAAAGG | | | |
| | | ACATGAATAATAAAATACACTCAGGGAAAAACCCTGTGTATAT | | | |
| | | TGAAAAGATAGTATCTCCTGAAAGGGGTGCTATTTTTGAGAGA | | | |
| | | AAATCTCTTTCTGCTCTTTGA (SEQ ID NO: 37) | | | |
| | DR | TTTCAATCTAACACAGTGGCATTAAAAC (SEQ ID NO: 38) | 6696 | 6723 | 28 |
| | DR | TTTCAATCTAACACAGTGGCATTAAAAC (SEQ ID NO: 38) | 6761 | 6788 | 28 |
| 0265297_{—} | IntCas9 | CTCAAACTCATCGAACTCGAACTCCGGGACGACATCAAGGAC | 1 | 1836 | 1836 |
| 10050537 | | AGAATGGAAGAGCGGAGGGCGCTGCGCAGGCATCGCAGGCAG | | | |
| | | CGGAAAAGGTACCGCAGGCCCATCGAGCCTGACCGCCAGGGC | | | |
| | | GGTGTCAGGTCCGCCCCCCCCTACCGCAGAGCCTGCGGTCAGA | | | |
| | | ACCGCGCATCGACCATGAAATGCATGTTCGTCAATCCCGTCAC | | | |
| | | CGGTGAAAAATGCTCCCTCAATGCTCCACTTAAAAAGAACATC | | | |
| | | CGCCGCGAACTCATGGCAATCACCCTGAAGAATTCGGACATTC | | | |
| | | CACCGGGTCTGAAAGACAATCTCGTCTCATGTTTCGACCGGAA | | | |
| | | GCGGAACCCGCCCCTCAGCACTTCTGATCTCATGGCCCAGCTC | | | |
| | | CGGAAATGGAACGCCCCCTCGCAGACCGTCCGCATGGTTGAAC | | | |
| | | AACTCCTGCACGGCAACCTGCACGGCCGCTCCGACTACTGCCG | | | |
| | | CGCGCACCTGCATGCCTGCGCCGGAGACTGGACCGCCGAGCG | | | |
| | | GCACTCCATGCCCCTTTCGAATTCCGTCCTCGCAAAACACTCCT | | | |
| | | CTCTCGTCAGCCTTCTTAAAAAACTGTCGAAGTATTACAACAT | | | |
| | | CGACAGAGTCCGCATCGAGGATTCCAACTTCGATCCTGAATTA | | | |
| | | ATACGTTCCGGCCGCCTGCTGGATTCCGGGGCAGGAGCGGACC | | | |
| | | GGCCGGATTTCCTCAAGAAAAATACTTTCAAGGCCCTGCAGCA | | | |
| | | CGAGTATTTAAACCGCTGCTGCTACTGCGGCAGGGACGGAAGC | | | |
| | | AGTACCCGTCTCGAGATCGAGCACGTGATCCCGAAATCCCTCG | | | |
| | | GCGGTTCCGACACCTGGGAGAATCTCGTTCTGGCCTGCGGCGA | | | |
| | | TTGCAACTCCCGGAAGGGCTGGCGGACCCCCGAAACCGCCGG | | | |
| | | TATGGATTTTCACGTCCTGGAAGGTGTGATTGTCGCCGGCGTG | | | |
| | | CCGCGCCGGGTTTCTCTGGAACCGGTCCCTTTCGAGCGCTCCC | | | |
| | | GGACCCGCGGATTCATGGATAAGACCGATCCCGGCAAACGAA | | | |
| | | CCGTCAGGAAACACCTCCGGCAGGTTTTTCCGCTGGCGGAATT | | | |
| | | CGAGTTCGACTTCGGCTACAGGACTTCATATCTGAGAAACAAG | | | |
| | | TGGAACTGGGAAAAATCGCGCTGCTGCGACGCTGCTGTGATCG | | | |
| | | CGGCCATGGCCGGCGGCGAGATACCAGGCGCTCCCCCCACCAT | | | |
| | | TCCACTGGAAAAATCAGTTTTGAAATTTAATTCCGGCGGCGGA | | | |
| | | AAACTGTTCGATACATTTCCCGTTTCAAAAACCGGCGCCGGCT | | | |
| | | ACGTGCAGGGCCGAACCCTCATAAGCCGCGACGGCAGGTTTG | | | |
| | | CCAGATTCACGTGGGGGGAAATTAAAAGGGTGGCTTCACCAG | | | |
| | | GGAAAAAGCGCATCCTTGAAAAACTTAAGGAGAAAGCCGGTG | | | |
| | | TGGGCGCCGTATCCGACGCAGACCTTATCCCGGACGACCTTTT | | | |
| | | AGAGACCCTGCCCTTCCGCCGTGTTACCCTCAAGAGAAAGGAT | | | |
| | | GTCGGCGCTTCCGCCGTCCGCGGGATCAACGGCAATTATTTCA | | | |
| | | AGGCGGAGCACCCCAACTGGGGAACAGCCGTTTATTTGGATA | | | |
| | | AAAACGGGAAGAAAAATTTCTTCATGATTAAGAACGCAAGGG | | | |
| | | TATTTGGAAAAACACAGCCTCCCGAAGATTTTGCCAGGCTCCT | | | |
| | | TTTCATCATCAGGAAGGGAGACCGTGTGAAGTTCACTTACAAG | | | |
| | | AACAGGCAGCGGATTGAAAAAGTTTATGCGAACTTCTCGAAC | | | |
| | | GGGAGCCTTAAACTGCTTACGGCCGATGGCGAGACAATCATG | | | |
| | | AAAAGCGCTAAATCCTGCGTCCCCGCCGGTGGACGGGACATA | | | |
| | | (SEQ ID NO: 39 | | | |
| 0272441_{—} | IntCas9 | ATGGCAAACGTCCTTGGGATAGACCTGGGCGGCAAGGCGGTG | 4333 | 6270 | 1938 |
| 10020685 | | GGGCTGGCCATCGTCCAGCAGCCGGAGAATCAGGTTCTCTGGT | | | |
| | | GCGGCACCGTTCACCTCTCGGATCGGATCAAGGACCTCTACGA | | | |
| | | CCAACGCCGCGTTCTGCGCCGCGCCCGGCGCTCCCGCGTCCGC | | | |
| | | TACCGCAAGCCGAAGGTCCAGCAGCGCGGCGGCGGCTCCGGC | | | |
| | | GGCCGGGGAACCGAAGGCGCCACCTACTTCTACAAGCGTGCG | | | |
| | | AAGGGCCTCAATCAGTCGCTCCGCAGAAAGTGCAAGTACGTG | | | |
| | | GACCCCAACACCGGCGAAGTCTGCGGCCGCAACACGCCCAAG | | | |
| | | CGAGGCAACGTCCGCCACCTGCTGATCGAGGACATCCTGAGCA | | | |
| | | ACTACTCGCCCTTCGCCACAGTCGATGCAACGCTGAAGCAAGC | | | |
| | | GATTCGCGACATCCTCGCCAGTCGCGAAGGAATCACTCGCCGC | | | |
| | | CAGGAGCGGCTCAAGAATGTTCTCGACCTCATCGACATCAACG | | | |
| | | CCGACCTGAAGAAGCAGATCACCGATATCTTGTTTGGCACAGG | | | |
| | | CGAGCGCCGCTGTGAGTTCTGCCGCGACCATATCCTCTCCCAC | | | |
| | | CACGAGCAGACGCAGACGCCGGCCGATCCCCGTTGGCTGCCG | | | |
| | | CCTTCGATCCGGCTCAAGCAGGAGTTTCTCCTCAAGCAGGTTC | | | |
| | | GCCGCCTCGCGCACCGTTACCGCATTGACCGCGTCGTCATCGA | | | |
| | | GCGGGCAAGGTTCGACCTTCAGAAGATCGCCCGCGGCGTCATC | | | |
| | | GACGACCCGGCCGAGTACCAGCAGGGCCACCGATACGGCTTC | | | |
| | | CGGAACGTCCGGGCGGCCCTCTTTCAGGAGTTCAGCGGCCACT | | | |
| | | GCTGCTATTGCGGGCGGAGCGTCATTGACAAGAAGTGGCACGT | | | |
| | | TGACCATGTGGACCCGCGCCGCAAGACGGGGGCGGGGCGGTG | | | |
| | | GGACAACCTGGCCGTCGCCTGCGAGTCCTGCAACCACACGAA | | | |
| | | GGGCGGCCGGTCGCCGCAGGAAGCGGGGATGGCGTTCGCGAC | | | |
| | | CATCCCGGCGGTCGTCGCGGGGCGCCGCATCCGCCGGTCGCTC | | | |
| | | GCGCCAAAACCGATTGAAGGCGCCCGCATCCACAAGTATATG | | | |
| | | ACGCAGACGGACCAGGGCATCCGAATCCTCAAGCGCGAGCTG | | | |
| | | CGGGAAATCCTTGGGGCCGTCGAGATCGACGAGACGTTCGGA | | | |
| | | TACGTCACGAGCGCCTGGCGAGACCTGTGGGAGTTACCCAAG | | | |
| | | GGGCGCGAGACGAACGAACACCACAACGACGCCATCGTGATC | | | |
| | | GCGGCCAACCTCACGCCGGATGCCCGCCCCAAGCTCGACGGC | | | |
| | | GAGCCGGAAGCCGTCCGGCAGTTGATCGGCGGCAAGCGACTG | | | |
| | | TACGATCAGAACCCCGTTTCCCGGCGGGGCGACGGGAAGTACT | | | |
| | | ACCAGCGTCAGCCGGTGCTGGCCGAGCAAGGCGGCATCACGC | | | |
| | | GCCGGCAGCTTCGCCAAGTGGTGGACGAGCGCAGGCGACGTA | | | |
| | | TCCTCGCCGCCGCGTTCGAGTACCACGGCGTCAAGGGCAACAA | | | |
| | | GACGCTGCCGCCCGCCGCGCTCCAGCAGTTGCCATTCAAGAGC | | | |
| | | GTGCGGCTGCGCAAGGCCGACTGCACCGATGAGAACACCCGC | | | |
| | | GCTCTCCCGGCCCGGAACCGCCGGCATCGCTACAAGATCTCCA | | | |
| | | ACACAGGCGGAACGCGCGTGAACGAGGCAGTGGCCGTGTATC | | | |
| | | AAACGACCGGCGGTCGCCGGGCCTGCTACGCCGTGAAGAACC | | | |
| | | GGCGCGTCTTCGGACGGACGCCGCCCCCGGAGGACCTCGCGA | | | |
| | | AGGAACTGTGGCGCGTGCGGCCCGGCGATACGCTCCACGATTC | | | |
| | | GTCGGGCGACGTGCTGGGCGCCGTCGTGAAGCTGGGAAGCAA | | | |
| | | CGGGACGCTGACGCTGGATAGCGGGAGAACCCGAATGGCTCA | | | |
| | | CCGATGCCACAGGGCGATCAGCCCCTGA (SEQ ID NO: 40) | | | |
| | Tracr | CGAGTTCGGAAGCAGCCTCAGCGATCCCGAGAGATCGGGAGC | 6905 | 7085 | 181 |
| | | CAGGGAACCCAACGAAAGGCGGGACCTGGCCAGAAGCTACGT | | | |
| | | TTGCAGGACAGCTGAAGACCTATGCCGGGATGTAGTGATCTCG | | | |
| | | TCTACCCAGTCCCGGCCCCTTGGAGTCTCGGCCCACAAGATCA | | | |
| | | ACGCCCCAGCG (SEQ ID NO: 41) | | | |
| | DR | AACGCTGACCCGCGTGCGTGGGAGTGAT (SEQ ID NO: 42) | 6345 | 6372 | 28 |
| | DR | ATTCCGGACTCGCGTGCGTGGGAGTGAT (SEQ ID NO: 43) | 6406 | 6433 | 28 |
| | DR | ATTCCGGACTCGCGTGCGTGGGAGTGAT (SEQ ID NO: 43) | 6467 | 6494 | 28 |
| | DR | ATTCCGGACTCGCGTGCGTGGGAGTGAT (SEQ ID NO: 43) | 6528 | 6555 | 28 |
| | DR | ATTCCGGACTCGCGTGCGTGGGAGTGAT (SEQ ID NO: 43) | 6590 | 6617 | 28 |
| | DR | ATTCCGGACTCGCGTGCGTGGGAGTGAT (SEQ ID NO: 43) | 6652 | 6679 | 28 |
| | DR | ATTCCGGACTCGCGTGCGTGGGAGTGAT (SEQ ID NO: 43) | 6713 | 6740 | 28 |
| | DR | ATTCCGGACTCGCGTGCGTGGGAGTGAT (SEQ ID NO: 43) | 6774 | 6801 | 28 |
| 0315277_{—} | IntCas9 | GTGAATACGGAAACGCGAGAGCAGGTGTTGGGGATTGACTTC | 1830 | 3848 | 2019 |
| 10040887 | | GGCCCGAAGCACGTGGGAATTGCTCTCGTGGCGAGGGGGGCC | | | |
| | | TCGTCGGAGGAAGTCCTCTTCGTCGCGGAGGTGCGGCTGAGGG | | | |
| | | ACCGCAAGTCGCTGCTGGCCGACCGGCGGGCGCTGCGGCGCG | | | |
| | | GGCGGCGAGGCAGGAAGCGCTACCGCCAGCCCAAGATTCCAC | | | |
| | | AGCGGGGCGGTGGCGCGACGTCGCAAAGCGGCGAGGAGAGCG | | | |
| | | AGAGGGGGCGCGCCGCAGCCCCGGAGTATCGTCGCGCCACAG | | | |
| | | GGCTCAACACAGGGCGACGACGCTGCAAGTTTGTCGACCCCCA | | | |
| | | GACGGGTGAAATATGCGGGTGGAATACGCCCCGCAAGGCCAA | | | |
| | | CGTCCGCGACCTCCTGCTGTGGAACATCTGCCGCCACCTTCCG | | | |
| | | GTGTCTGTCTCCGAGCAGGCGGGGTTCCTCGCTTACGTCAACC | | | |
| | | AGACGAACCTCCACCGCGCGGAGATACTGGGTGCTCTGCCGGC | | | |
| | | GGAAGAGCAGGCCCCGCTGGAGGCCGTGTTCTCGCAACAGCG | | | |
| | | GCGGCCGAAAGACGAGCGGCTGAAGGACCGGCTACGAAGGCT | | | |
| | | CGGCGTTGACCGGCACCTGCGCTCGCAGGTCACGGACATCGTT | | | |
| | | GGCATCACCTCTCGCCGGCCGCTCAGCGGGCGGCTGTCTTTCT | | | |
| | | GCCGCGAGCATTTCCTGCGCCACCACGAGCAGAGCCGCGTTCC | | | |
| | | CCGGCCCAGCGTGTGGCTCCCGAACACTGTTGAGATGAAGCAA | | | |
| | | GCGGATGTGCTAAAGGTCTGCCGGCAGGAGGTCGCGCCGCGC | | | |
| | | TGGCGTGTTGACTGCATAGTGCTAGAGCGGGCCAACTTCGACT | | | |
| | | TGCAGCTTCTCCGGCAGCAGACCGCCATCGAATGGTCGGTGGA | | | |
| | | GGACTGGCAGCGCGGCCCGCGGTGGGGCTACCGCAACACCTT | | | |
| | | CGAGGCGAAGAAGCAGGAGCAGGGGAACCGCTGCGCCTACTG | | | |
| | | CGGCAGCAAGCCGACGGCGAAGAACCGGCTGAGGCTGGAACT | | | |
| | | GGAGCACGTCATTCCAGGTGGGGGCGACACGTGGGAGAACCT | | | |
| | | GGTGCTAAGCTGCCGGAAGTGCAACGAGGGCAAGGGTAATCG | | | |
| | | CAGCCCTGCGCAGGCCGGCATGCGCTTCTGGACGGACACCGA | | | |
| | | GACGGGAGAGACGCTCTCCCCGGCGCCGCTCGGCGCCGCGCA | | | |
| | | CGTTTCCCGCTACATGACCCAGACGGACCAGGGGTGGCGTCGC | | | |
| | | CTTCAGGCCGCGCTACAGCAGGTCTTCCCCCAGGCCGCAGTCG | | | |
| | | AGCACACCTGGGGGTACGTGACGAGCTTCTACCGTAACCGCTG | | | |
| | | GAACCTCCCCAAGAAGCACTTCGTGGACGCGGCCGTCATCGCC | | | |
| | | AGCTCGCACGAGCTTGAGCGCCCCGTGTCCGTGCCCGAACAGC | | | |
| | | CCCAGCGGTTTGCTCCGACATCCGGCGGCAAGCAGCTCTTCGA | | | |
| | | CACGAACCCCCTCTCAAAGCGGCCGGAGGGGCGCTTCGCTCAG | | | |
| | | AGCAAGGCGATTGTGTGCGAGCAGGGGACGCTCGCCTTCAAA | | | |
| | | GATGTCGCCAAGGTAGAGAACCCGCGCAAGCGCGCCACGCTT | | | |
| | | CAGCGCGTCGCGGATGAGGCCACCGCAGCAGCAAAGGCGCGG | | | |
| | | GGCGAAACCCCGCCCACCGCGTTCACCGCTGAAATGCTGCCGA | | | |
| | | AGATACCATTCAAGTCTGTGCGCCTTGCCAAGCAGGACGCTAG | | | |
| | | CGACACCAACACACGCCGACTCGGCCGGCATTGGTTCAAGGTC | | | |
| | | GCAAGCGCCGTGAATATCGCGACCATCGTCTACCAGCTCGACG | | | |
| | | GGAAGGTTTGCATGCAACTCCAACGCAACCCCGCGGTCTTCCG | | | |
| | | TCATGACCCTGGCTTGCCGCAGGGGGCGCGCGTTGTCGCCACC | | | |
| | | TTCCGCAAGGGCGACCTGGTGGAGTGTGACGCGGGCCGCGGT | | | |
| | | CGGGTAACGAAGAACCACAGTAACTGCACTCTCACCGTCGAA | | | |
| | | CTGCTGGACAGTGGCAAGGAGGTGACGAGGCTGGCGAAGTCG | | | |
| | | TTCAGGCCGCGGCATGGCTAG (SEQ ID NO: 44) | | | |
| | Tracr | GAAGGGCGAAAGCAGCCCAGCCAAGTCTCCGCCCATGGCGGA | 1548 | 1734 | 187 |
| | | GCACGGGAAACCGGTGGGGAAACCCGGCCGGCCACCGTAAGG | | | |
| | | AGGCACGTTTGGGGAACAGGTAGGGGTAACCCTGAGTGCAAC | | | |
| | | CTGGGGTGCACCTTCAGCTCCAGGCTCTGCAAGGCTCGGCCCA | | | |
| | | GAGGATTAACGCCCTAAT (SEQ ID NO: 45) | | | |
| | DR | TTTCGCCCTCGCATTGGTGGACAGCACG (SEQ ID NO: 46) | 814 | 841 | 28 |
| | DR | TTTCGCCCTCGCATTGGTGGACAGCACG (SEQ ID NO: 46) | 878 | 905 | 28 |
| | DR | TTTCGCCCTCGCATTGGTGGACAGCACG (SEQ ID NO: 46) | 939 | 966 | 28 |
| | DR | TTTCGCCCTCGCATTGGTGGACAGCACC (SEQ ID NO: 47) | 1000 | 1027 | 28 |
| | DR | TTTCGCCCTCGCATTGGTGGACAGCACT (SEQ ID NO: 48) | 1062 | 1089 | 28 |
| | DR | TTTCGCCCTCGCATTGGTGGACAGCACT (SEQ ID NO: 48) | 1125 | 1152 | 28 |
| | DR | TTTCGCCCTCGCATTGGTGGACAGCACG (SEQ ID NO: 46) | 1189 | 1216 | 28 |
| | DR | TTTCGCCCTCGCATTGGTGGACAGCACG (SEQ ID NO: 46) | 1250 | 1277 | 28 |
| | DR | TTTCGCCCTCGCATTGGTGGACAGCACG (SEQ ID NO: 46) | 1311 | 1338 | 28 |
| | DR | TTTCGCCCTCGCATTGGTGGACAGCACG (SEQ ID NO: 46) | 1372 | 1399 | 28 |
| | DR | TTTCGCCCTCGCATTGGTGGACAGCACG (SEQ ID NO: 46) | 1433 | 1460 | 28 |
| 0315279_{—} | IntCas9 | ATGGAGAACGTCCTCGGGATAGACCTTGGTGGGAAAGCGGTC | 1421 | 3340 | 1920 |
| 10036605 | | GGGCTGGCGGTAGTCGAGCAGCCCTCCAACCGCGTCCAGTGGT | | | |
| | | GCGGGACCGTAAGACTCTCGGACAAGATCAAGGACCTCTACG | | | |
| | | ACCTTCGGCGAACCCTCCGCCGCGCCAGGCGAAGCCGGGTGC | | | |
| | | GTTATCGAAAGCCCAAGGTCGCCGAAAGAGGAGGCGGGGCCG | | | |
| | | GGGGGAAAGGCGAGGAGGGGGCGACCTACTTCTACCGGAAAG | | | |
| | | CCAAAGGGCTGAATCAGTCGCTGCGGACAAAGTGCAAGTACG | | | |
| | | TCGATCCCCAGACGGGAGAAGTCTGTGGAAAGAACACGCCCC | | | |
| | | AGATGGCCAATGTCCGCCACCTCCTCCTGGAGGACATACTCGG | | | |
| | | CTTTGCGCCCTTTGCCCCGGTGGGGGAGGACTGCAAGCAGGCC | | | |
| | | ATCCGAGACATCCTGGCCTCGCAGGACGGCGACGCGCGACGC | | | |
| | | CGGGAACGCCTCGAGAACGTCCTGGGGCTGATCGATCTGTCCG | | | |
| | | AATACCTCGAGGAGCAGATCAAGGACATCATCTTCGGGAAGG | | | |
| | | GCGACGGGCGTGCCCAGTTCTGCCGCTCGCACATCCTGGGCCA | | | |
| | | CCACTCGCAGACCGAGACTCCCAAGCAGGCCGCGTGGTTGCCG | | | |
| | | CCATCGCTGAAGCTCAAGCAGGATTTCATCCTCAAGGTCATCC | | | |
| | | GCGAGCGGGGCAAGCCTTGCCGCATCGATCGAATAATAATCG | | | |
| | | AGCGGGCGAACTTCGACCTCCAGAAGATCGCGGCGGGGGTGA | | | |
| | | TCGAAGACCCGCGCGAGTACCAGCAAGGGTATCGCTACGGAT | | | |
| | | TTCGCAATACCCGTGCGGCGCTGATGCAGGAATACGGGGCGA | | | |
| | | GGTGTTGTTATTGCGGTAAGAGCGTGGCGGGGCAGAAATGGC | | | |
| | | ACATCGACCACGTCGATCCGCGCAGGACGGGCGAGATCAACC | | | |
| | | GCTGGGACAACCTCGCCATAGCCTGTGAAAAGTGCAATCACA | | | |
| | | GCAAAGGCGGGAAGACCCCCAAGGACGCGGGCATGCGCTTCG | | | |
| | | CGGTGGTGACGGAGAAGGTCGCTGGGCGCAAGATACGCCGCT | | | |
| | | CCCTGGCCCCGAAGCCCGTCGAGGGCACCCGCATTCACAAGTA | | | |
| | | CATGACCCAGACCGACCAGGGCATAAACATGCTAAAGAACGC | | | |
| | | TCTGAGGGAAATCTTCCCCGCTGCTCCCATCGAGGAGACCTTC | | | |
| | | GGCTACGAGACCGCCGCCTGGCGGGACCTGTGGGGGCTGGAG | | | |
| | | AAGGGCAAGGAAAAAGGCGAGCACCACAACGATGCCATCGTC | | | |
| | | ATCGCTTCAGCCCGTGTCCCGGAAGGGATTCCCAAGGCAGACG | | | |
| | | CGCAGCCCGAGGCAATATCGCAGACCGTTGGTGGGAAGCGCC | | | |
| | | TCTTCGATCTCAACCCGGTCTCCCGCTCGCCCAACGGGCGTTA | | | |
| | | CTACCAGAGAACGCCGGTTTTGGCCGAATCCGGGGGGATAACT | | | |
| | | CCCAGGCAACTCCCCGCCGTGGTGGACCAGCGCAAGCGGAAG | | | |
| | | CTCCTGGCACGCGAGTTCGAACGCTACGGGATCGAGGGGAAC | | | |
| | | AAGAAACTCCCGGACCGGGCCCGGGAGCGCCTGCCCTTCAAG | | | |
| | | AGCGTCTTGCTGCTCAAGCGGGACTGCGCGGACGGGAATGTGC | | | |
| | | GCCGGATGAGAACCGGTCATTCCTTCAAGGTCTCCAATGCCGG | | | |
| | | CGGAACCAGGGTCAACGAAGCGGTAATCGTCTACGAGAACCT | | | |
| | | TTTGGGGAAACTATCCTGTTACCCGCTCAAGAACCCCCGGGCC | | | |
| | | TTCGGGCCTACGAGACCACCGGATGATTTCAAGAGGGAATTGT | | | |
| | | TCCGATTCCGTGCAGGCGACAGAATCGTTGACCTCAACGGAAG | | | |
| | | GTCCCTCGGGGAGGTTGTGGAGTTTGGGAGCGACGGCAGGTTG | | | |
| | | ACAACAGACAAAGGACATAACACAATAGCACACAGGTGCAGA | | | |
| | | CGGGGGAGTTAG (SEQ ID NO: 49) | | | |
| | Tracr | CGAGGTCGAAAGCAGCCACAGCGAAGGCCCCGCAAGGGCGCC | 4110 | 4292 | 183 |
| | | TGCCGGAGAATCCAACGAAAGGCGGAATCCGGCCACGAGCTA | | | |
| | | CGTTTGCAGGGAAGCCTAAGACCTATGCCGGGATGTAGTGACT | | | |
| | | CGTCTACCCAGCCCCGGCCTCTTGGAGTCTCGGCCCGGAAGAT | | | |
| | | CAACGCCCTCCCC (SEQ ID NO: 50) | | | |
| | DR | CTGCGAGCCTCGCGAGCATGGGATTGAT (SEQ ID NO: 51) | 3427 | 3454 | 28 |
| | DR | ATTTCGGCCTCGCGAGCGTGGGATTGAT (SEQ ID NO: 52) | 3488 | 3515 | 28 |
| | DR | ATTTCGGGCTCGCGAGCATGGGATTGAT (SEQ ID NO: 53) | 3550 | 3577 | 28 |
| | DR | ATTTCGGCCTCGCGAGCATGGGATTGAT (SEQ ID NO: 54) | 3611 | 3638 | 28 |
| | DR | ATTTCGGCCTCGCGAGCATGGGATTGAT (SEQ ID NO: 54) | 3674 | 3701 | 28 |
| | DR | ATTTCGGCCTCGCGAGCATGGGATTGAT (SEQ ID NO: 54) | 3737 | 3764 | 28 |
| | DR | ATTTCGGCCTCGCGAGCATGGGATTGAT (SEQ ID NO: 54) | 3798 | 3825 | 28 |
| | DR | ATTTCGGCCTCGCGAGCATGGGATTGAT (SEQ ID NO: 54) | 3860 | 3887 | 28 |
| | DR | ATTTCGGCCTCGCGAGCATGGGATTGAT (SEQ ID NO: 54) | 3921 | 3948 | 28 |
| | DR | ATTTCGGCCTCGCGAGCATGGGATTGAT (SEQ ID NO: 54) | 3983 | 4010 | 28 |
| 0315281_{—} | IntCas9 | TTGCATCATAAGCAGCTGACAGTAGAAGCTGAAAGTTCGTGGC | 26 | 1495 | 1470 |
| 10072405 | | TATCCAACAGCATCAGGGCAAAACAAGACCAAGTCATATCAC | | | |
| | | ATCTTGAGAAGTTAGCGAAACATTTTTCAATAAGTGAAGTGAT | | | |
| | | TCTGGAAAGAGCAAACTTTGACCTTCAGAAGATACAGGGAAT | | | |
| | | GATTGAGAATCCTGATGATTATATGCATGGGTTCAATTTCGGT | | | |
| | | CACAGAAACAGGTTTGAAGCTTTGAAGCAGGAATACGGAAAT | | | |
| | | CGTTGCTGCTTCTGTGGGCAAACAGGTGGCGAAAAAGTAAGG | | | |
| | | CTTCAAATCGGACATGTTTATCCGAAAGCAAAGGAAGAAATTA | | | |
| | | ACCGATGGGAAAATCTCATTACTATTTGTGAGAAATGCAACAT | | | |
| | | CAAACAAGGCGGAAGAACACCTGACGAAGCAGGGATGAAGTT | | | |
| | | TGCAGTAGTAAAAGAGAAAGTCTTCAATCCAGTACTTGGACAA | | | |
| | | ATAATAACTGCATCAAGAACGCTTTCACCGAAACCACTCAGTG | | | |
| | | AGTCTAAAATAAATAAATACATGACACATACGGATATAGGAA | | | |
| | | TAAGAAAACTAAAGAAGCAAATTAATTCAATGTTTGGAGATAT | | | |
| | | ACCTATAAAAGAAACCTTTGGTTATATAACATCTTATTATCGA | | | |
| | | AATCACTGGGGATTGGATAAAGAGCATTACAATGATGCGATA | | | |
| | | GTTGTCGCATCTGAAAAAGGTGATTTAAACAAGAAGCCTCAAT | | | |
| | | CCCCATATATAAAGCCCGTTGTTATCAATCCGAAGATTAAAGG | | | |
| | | CGAGAAACTTTTCGACACCAATCCTCTACAACATAAGAATGGC | | | |
| | | AAGTTCTATCAACAAATATCTTTGATAGGCAGAAAAAAGAGTG | | | |
| | | CTCGTTCTTCAAATCATAAAGCTGGACAGAGAAAAATAAGGG | | | |
| | | CATATAATGCATTACGGATTGACCAGATTGAGTTGATTATGTC | | | |
| | | TGCATGGAAACGGAAAATACTTGATGAGTTAAGAGAGAAACT | | | |
| | | CGGCTATATGAAGGGAGACAGGAAAAAATACTTCAAGCCCGA | | | |
| | | TGACATCATAAATGCAAATCTGCCATTCAGAACTGTGACCATA | | | |
| | | GAAAAACTAGGAGTTGGCGAGAGTGCGGTAAGAAAAATCAAG | | | |
| | | AATAATGTTTTTCGTGTCGCTTCTGATGTCAATACCCATATAAT | | | |
| | | GGTTTACTCCACGCCTGACTCAAAAATGAAAGCGATTCCTATC | | | |
| | | AAGAATACAAGAATATTTAAAGATGTTGACATGCATAGAGATT | | | |
| | | TCTCCAAGAAACTTTTCATAGTAAAAAAAGGAGATGTAGTCTG | | | |
| | | CTGGAAAAACAAAGGAGTCGAGATTACAGGTAAGGTAATGAA | | | |
| | | ATGCTTGACAAAGGGTGCGAGCATTGATATAAAGGATATGGA | | | |
| | | TTCTGACAAGACCTACAGCGCTAAGAACCCTGTTTGTATTCAG | | | |
| | | TCGGTTCGTTCCTCTGAAGGTAAATTGCTCTTTGAAAATAGAA | | | |
| | | ACTCAAGATTGAAAACCGCC (SEQ ID NO: 55) | | | |
| | DR | TTTCAATCTCACATTAGTGGCATTTAAAG (SEQ ID NO: 56) | 1725 | 1753 | 29 |
| | DR | TTTCAATCTCACATTAGTGGCATTTAAAG (SEQ ID NO: 56) | 1791 | 1819 | 29 |
| | DR | TTTCAATCTCACATTAGTGGCATTTAAAG (SEQ ID NO: 56) | 1856 | 1884 | 29 |
| | DR | TTTCAATCTCACATTAGTGGCATTTAAAG (SEQ ID NO: 56) | 1923 | 1951 | 29 |
| | DR | TTTCAATCTCACATTAGTGGCATTTAAAG (SEQ ID NO: 56) | 1991 | 2019 | 29 |
| | DR | TTTCAATCTCACATTAGTGGCATTTAAAG (SEQ ID NO: 56) | 2058 | 2086 | 29 |
| 0315285_{—} | IntCas9 | ATGCCGAACGTCATGGGGATAGATTTGGGCGGCAAGGCCGTC | 7055 | 8974 | 1920 |
| 10000442 | | GGGCTGGCTATCGTCCAGCAGCCGGAGAATCGCACTCTATGGT | | | |
| | | GCGGAACAATCCATTTGTCGGACAAGATCAAGGACCTCTACGA | | | |
| | | TCTCCGCCGTACGCTCCGCCGAGCCCGCCGCAGCCGCGTGAGA | | | |
| | | TACCGTAAGCCCAAAGTCCCCCAGCGCGGCGGCGGGTCCGCC | | | |
| | | GGCCAATCGCAATGGAGCGGCTACTCTTACCGCCGCGCCAAAG | | | |
| | | GACTGAACCAATCCCTTCGGACCAAGTGCAAGCACGTCGATTC | | | |
| | | TGAAACCGGCGAGGTCTGCGACAAGAACACCCCGAAGAACGC | | | |
| | | CAACGTCCGCCACCTGTTCCTCGACGACATCCTTAGCTACGCC | | | |
| | | CCATTTCAAGCCGTGCCCGATGACCACAAGCAGTCCATCCGCG | | | |
| | | AGGTCCTCACCAGCCGCGATGGTATAGCCAGCCGGCGCGAGC | | | |
| | | GTCTGGCGGATCTCCTTGACCGGCTCACCGTCAAAGCCTATCT | | | |
| | | CAAGAAGCAGATAAAGGACATCTGTTTCAATGACCTCGACGG | | | |
| | | CCGCGCGGAGTTCTGCAGCGACCACATCCTTTGCCACCACGCC | | | |
| | | CAGACTGACGTGCCCAAACAGTCGGCCTGGCTGCCGCCCTCGA | | | |
| | | TCCGCCTCAAGCAGGATTTCCTCCTGAAGAACATCCGCGAACT | | | |
| | | GGCCCAGCTTTTCCACATCGACCGCATCGTTCTAGAGCGGGCC | | | |
| | | AACTTCGACCTCCAGAAGATCGCCGCCGGCGTGATTGAAGACC | | | |
| | | CATCAGAGTACCAGCAGGGCTTCCGGTTCGGTTCCCGCAACAC | | | |
| | | GCGGATGGCCCTGATGCAGGAATACGGCGCGCGTTGCTGCTAC | | | |
| | | TGCGGCCAGAGCGTCGCCGGCCAGAAATGGCATGTTGACCAC | | | |
| | | ATCGACCCGCGCCGCGCTGGGGAGGCCAACCGGTGGGACAAC | | | |
| | | CTGGCCATCGCCTGTGAAAAGTGCAACCACCAAAAGGGAGGC | | | |
| | | CGCACGCCGAAGGACGCCGGGATGGCCTTCGCCGTCATCTCCG | | | |
| | | AGAGAGTCGCCGGGCGGATGATACGCCGCTCCCTGGAGCCCC | | | |
| | | ACCCCATCGAGGGAACCCGGATCAACAAGTACATGACCCAGA | | | |
| | | CCGACCAGGGCATCCGCATGCTGAAAAACGCCCTCCGGGAGA | | | |
| | | TCTTGCCCGGCGCAGAGATCGAGGAGACTTTCGGCTACGTCAC | | | |
| | | CAGCGCCTGGCGGGAGTTCTGGGGCCTCGAAAAGGGCAAGGA | | | |
| | | AAAACAAGAGCACCACAACGACGCCATTGTCATCGCCGCCGA | | | |
| | | CCGCCGCGGCGGCGCGAAGCCCATCGTCGAAATAATTCCACTG | | | |
| | | GCCAATCGCCAGATCGTGGGCGGCCGCCGCCTGTTCGACCTTA | | | |
| | | ACCCCGTTCAGCGCGCGCCCGACGGCCGGCATTATCAGCGGAC | | | |
| | | CCCCGTCGCGGCCGAGGTAGGGGGAGTCTCACCGAGCCAGCT | | | |
| | | AAAGGCCGTGGTGGACCCTCGAAAGCGGGAACTTCTCACCCG | | | |
| | | CGAATTCGCCCATCACGGCGTTACCGGCAATAAGTCGCTCCCG | | | |
| | | CCGGCCGCGCTGGAACGCCTGCCGTTCACCAGCGTCCGGCTGC | | | |
| | | GAAAGCCGGACTGCACCGACACCAACGTCCGACAGATCCCAT | | | |
| | | CCGGCCACCGCTTTAAGTTGAGTAATTCCGGCGGCACGCGCGT | | | |
| | | CAACGAGGCGGCCGTCGTCTACCGCACAACGGCCGGCAAGGT | | | |
| | | GGCTTCCTATGTCGTGAAGAACCGCTTGGCCTTTGGGCAGACG | | | |
| | | CCCCTTCCTGGAGATTTCGAGAGGGAACTTTGGCGTGCAAAAC | | | |
| | | CGGGCGACGTATTGTACGATGCTGGCGGAAACCCCTTCGGAAG | | | |
| | | CGTTACGAAGATCGGCAGCAACGGAACCATGACCTTGGATAC | | | |
| | | AGGAAAATCAAGAATGGCACATCGGTGCCGGAAGGGAGGAAC | | | |
| | | ATAG (SEQ ID NO: 57) | | | |
| | DR | CGCGAGGCCTCCCACGCACGGGTTGAAGC (SEQ ID NO: 58) | 8996 | 9024 | 29 |
| | DR | ATCTTGGCCTCGCACGCACGGGACGAAGG (SEQ ID NO: 59) | 9057 | 9085 | 29 |
| | DR | ATTTTGGCCTCGCACGCACGGGATGAAGG (SEQ ID NO: 60) | 9117 | 9145 | 29 |
| | DR | ATTTTGGCCTCGCACGCACGGGATGAAGG (SEQ ID NO: 60) | 9178 | 9206 | 29 |
| | DR | ATTTTGGCCTCGCACGCACGGGATGAAGG (SEQ ID NO: 60) | 9239 | 9267 | 29 |
| | DR | ATTTTGGCCTCGCAGGCACGGGATGAAGG (SEQ ID NO: 61) | 9300 | 9328 | 29 |
| | DR | ATTTTGGCCTCGCAGGCACGGGATGAAGG (SEQ ID NO: 61) | 9361 | 9389 | 29 |
| | DR | ATTTTGGCCTTGCAGGCACGGGATGAAGT (SEQ ID NO: 62) | 9423 | 9451 | 29 |
| | DR | ATTTTGGCCTCGCAGGCACGGGATGAAGG (SEQ ID NO: 61) | 9485 | 9513 | 29 |
| | DR | ATTTTGGCCTCGCAGGCACGGGATGAAGG (SEQ ID NO: 61) | 9545 | 9573 | 29 |
| 0315289_{—} | IntCas9 | ATGGAAAACGTGCTGGGGATAGATCTGGGCGGGAAGTTCGTC | 4343 | 5497 | 1155 |
| 10046034 | | GGGCTGGCAGTCGTCAGGCAGCCGGATAATCACGTCCTATGGT | | | |
| | | GCGGTACCCTGCACCTGTCTGACAAGATCAAGGACCTCTACGA | | | |
| | | CCTCCGCCGTGTCCTCCGCAGGGCCAGACGCTCCAGGGTCCGC | | | |
| | | TATCGCAAGCCAAAGGTGCCCCAGCGTGGAGGCGGCGCCTCA | | | |
| | | GGCAGCGGGGCGGACGGAGCTACCTATTTCTACCGTCGGGCCA | | | |
| | | AGGGGCTCAACCAGTCCCTACGGACCAAGTGCAAGCACGTAG | | | |
| | | ACCCACAGACCGGGGAAGTCTGCGGCAAGAACACCCCCCGTG | | | |
| | | CCGCCAATGTCCGGCATTTGCTGCTGGAGGACATCCTGGGCTT | | | |
| | | CGAGCCTTTCAAGGCCGTCCCCGAATCCTACCGCCAGGCCCTG | | | |
| | | CTGGAAGTGTTGGCGGCAACACAAGGCACGCCCCGAAAGCAG | | | |
| | | CAGCGGCTTAAGAACATCCTTGCCCAGGTGGACGTGGACAGCT | | | |
| | | ATCTCAAGAAGCAGGTGATCGACATCATCTGCAACGACCTCGA | | | |
| | | TGGCCGCTGCGAGTTCTGCCGGGACCACCTGCTGGCCCACCAC | | | |
| | | CAGCAGACCGCCGTCCCGAGGCAGGCGTACTGGCTGCCCCCAT | | | |
| | | CGATCAAGCTCAAACAGGACTTCCTGCTCAAGCATGTCCGCCA | | | |
| | | GCTTGCCCGCCGCTTCGACATCGACAGGATCGTCATCGAGCGA | | | |
| | | GCCAGGTTCGACCTCCAGAAGATTGCCGCCGGGGTTATTGACG | | | |
| | | ATCCAACGGAGTACCAGCAGGGCTTCCGCTTCGAGTTCCGCAA | | | |
| | | CACCCGCGCCGCACTCCTACAGGAGTACGACGGGCGGTGCTGC | | | |
| | | TACTGCGGCAAGGAAGTTTTCGGTCAGAAGTGGCACGTTGACC | | | |
| | | ACGTGCAGCCCCGCCGACAGGAGCAAGTCGATCGCTGGGACA | | | |
| | | ACCTGGCTATCGCTTGCGAGAAGTGTAACCATCTCAAGGGCGG | | | |
| | | GCGCGATCCAGAAGAAGCCGGGATGTCCTTTGCCGTGGTGACT | | | |
| | | GTCAAGGCAGCCGGCAGGCCCATCAAGCGGTCATTAGCCCCC | | | |
| | | AGGCCCATCGAGGGCAGCCGCATCCACAAGTACATGACCCAG | | | |
| | | ACCGATCAGGGCATCCGGATGCTGAAGAGCGCCCTGGGGGAG | | | |
| | | CTT (SEQ ID NO: 63) | | | |
| 0315294_{—} | IntCas9 | GTGGTCGTGAGGCCACAAGGCAAGCTGGACCATATTCCTATCC | 743 | 3052 | 2310 |
| 10042545 | | CTAAACCTGAGCGAGGAGGCATTACAATTCGGTCCGAGAACG | | | |
| | | TGCTGGGAATTGACTTCGGGCCGGAGCACGTGGGGCTGGCCTT | | | |
| | | GGTGCGGCGGGAGCCGGCCGGGGAGCAGGTGCTCTACGCGGC | | | |
| | | TTCCATCACCTTGCGCGACCTGTCCCCGGTGATGAAGGAGCGC | | | |
| | | CGCGCTCTCAGGCGGCAGCGGCGCTCTGAGTCATGGTACCGCC | | | |
| | | AGCCCAGGGTCCCACAGCGGGGCGGGGGCAGCGCGCGGGGAG | | | |
| | | CCGGGGCCCAGGAAGATGAGCAGGCCGTCGAGGGTGTGCCGG | | | |
| | | AAGAGGAGGAGGATCGAAGTCGTGCGCGGTCCGCTCCCGAGT | | | |
| | | ACCGGCGGGCGCAGGGATGCAATAAGCCCAAGCGAAAGTGCA | | | |
| | | AGTATGTTGACCCTAAGACCGGCGAGGTCTGCGGGGCCAACA | | | |
| | | CCCCTCGCAAGGAGAAGGTTCGCGATCTGCTGCTGTGGGACAT | | | |
| | | CTGCCAGCACCTGCCGGTGGAACCCGAGCAGCGCCTTGCCATC | | | |
| | | CTCAGCTACGTCAATCAGGTCAATATTGTCCGCCCGGAAGTGC | | | |
| | | TGGCGTGCCTTGCCCTGGAAGAGCGGGCCTTGCTGGAAAACCA | | | |
| | | TCGAGCTCTGGCCCGCGCTTCGAAGAGCAAGCCTCTCCCCCAG | | | |
| | | CTTCTCTGCGAACTGAAGATCAAGAAACAGTTACAATCCCAGA | | | |
| | | TTCTGGCGATCGCCAGCGGAGACCCCGAACGCAAAGCCGCCG | | | |
| | | ACCTCAAGGGGCGGATGCCCTTCTGCCGCAAGCATTTTCTCCT | | | |
| | | TCACCACGAACAGACCAGGATTCCCAAGCCCTCCGCCTGGCTT | | | |
| | | CCGCCCAGTATCCGGTGTCGGCACGCCGACCTGGAGAGGGTCT | | | |
| | | GCCGGGAGGAGGTCGCCCCCCGCTGGCCGGTCCACCGGATCA | | | |
| | | GGCTGGAGCGGGCGCAGTTCGACCTGCAGGCCATTCAGCGAG | | | |
| | | ATCCCCAGGGGCGGGGTAAGGACTGGGACCCCGAGGAGTGGC | | | |
| | | AGCGAGGTCCTTGTTGGGGCCGGCGTAATATCTACTCGGCGAA | | | |
| | | GCGGCATGAGCAGGGTAATCGCTGCGCCTATTGCGGAAAAAA | | | |
| | | CCCCAAGAAAGAGAACCGATTAGAGCTCGAGCACGTTAAACC | | | |
| | | GGGTGGCGGCAATACTTGGGATAACCTGGTGCTGGCCTGCCGT | | | |
| | | AAGTGCAACCAACGCAAAGGGAAGGCTGACGCCCCGGGTGCC | | | |
| | | GGTCTTGAGTTTTCCGTTGACCCCGATACCGGAGTGAGTCTGG | | | |
| | | CTCCCAGGGGATTGGGAGAGTCCGTGGTGGCCCGGTACATGAC | | | |
| | | CCAGACCGACCAGGGATACCGGGAGCTGGTGGCCCGCCTGCA | | | |
| | | GCAATTGTTCCCCGACGCCCAGATCGAGTACCGCTACGGCTAT | | | |
| | | CAGACGGATCATATTCGTAAACGGTGGATCGGCTCGGCCCAGT | | | |
| | | TTGCGGAGACCGCTTTGTCACTCGGCTACAAACAGTCGCCGCC | | | |
| | | GCGGCCGAAGAAACGCCGAAAGCAGTGGACCGAATTGGCGCA | | | |
| | | TCTGAAGCGCAAACCCAGGCGACACAGCGATCCCCTCAAAAG | | | |
| | | TCATGTGATGGACGCGGTCGCCATCGCTAGTGCCCTAGAGCTC | | | |
| | | GACTCTCCGCCGCAGCTTTGCCCGGCGGAGAAGATTATCCTTC | | | |
| | | GCCCTTCTCGACGCCAGCTCTTCGACACCAACCCCCTCCAGCG | | | |
| | | CGGAAGTGACGACAAGTTTTACCAGCGGGTGAAGATTTGCGG | | | |
| | | CACCCAGGGCGGGCTGGCCTTCGACAAGCTGAAGCACGTGGTT | | | |
| | | GATGACAGCAAGCGGGCGATTCTGGAGCGAGTGCGCGACCGG | | | |
| | | CTGATCGAGCAGGCTAAGGTGATCGAGCAGCCTAAGGGCAAC | | | |
| | | AAAGAATCCCCGCCCAGCGCCTTCACCCCGGATGCTGCCCAGC | | | |
| | | TGATCCCCTTCACGTCTGTTCGCTTGGCCAAACGAGACGCCTC | | | |
| | | CAAGACCAACACCCGGAGGTTAAAGGGCGGGCACTGGTACAA | | | |
| | | GGTTGCCGGTGGGCCCAATTGGGCCACCGTCGTCTATCGGCTT | | | |
| | | GGCGTCCGTGAACAGGTAATCGTGATTCGCAACCCAGCAGTGT | | | |
| | | TCCCCGACGATTCAGCGGAACTGCCGAAAGGCGCTCAGGTGCT | | | |
| | | CTTTTCCTTCCGAAAGGGAGAGTTGGTTTCCTTTGAGCAGGAT | | | |
| | | GGGCAAACAACGCGCGCCCGAATCACCAAGAACAACAGCAAC | | | |
| | | GGCACTCTAACCGTCGAACGCCTCGACGACGGCCGGGAAGTG | | | |
| | | ACCCGGTCAGCTCGCTGCTTTCGCCCCGTCCCCCTGCTAGCGCC | | | |
| | | CAACGCCTGA (SEQ ID NO: 64) | | | |
| | Tracr | CGGAGAGTGAAAAAAGCTCAGCCAAGGGAGACCCCGCGGGAA | 553 | 720 | 168 |
| | | ACCGTCAGGGGCCACCGTTAGGAGGCAAGTTTGGGGAATAGG | | | |
| | | TAGGGGTAACCCTAAGTGCAACCTGGGGTGCGCCTTCAGCTCC | | | |
| | | AGGCTCTGCAGGGTCCGGCCCAGAGGACTAACGCCCTAACG | | | |
| | | (SEQ ID NO: 65) | | | |
| | DR | CTCCTACTCTCCGGTAAAAGGGCGGTGTGCTACAGC (SEQ ID | 57 | 92 | 36 |
| | | NO: 66) | | | |
| | DR | GTTTCACTCTCCGGTAAAAGGGCGGTGTGCTACAGC (SEQ ID | 123 | 158 | 36 |
| | | NO: 67) | | | |
| | DR | GTTTCACTCTCCGGTAAAAGGGCGGTGTGCTACAGC (SEQ ID | 189 | 224 | 36 |
| | | NO: 67) | | | |
| | DR | GTTTCACTCTCCGGTAAAAGGGCGGTGTGCTACAGC (SEQ ID | 255 | 290 | 36 |
| | | NO: 67) | | | |
| | DR | GTTTCACTCTCCGGTAAAAGGGCGGTGTGCTACAGC (SEQ ID | 320 | 355 | 36 |
| | | NO: 67) | | | |
| | DR | GTTTCACTCTCCGGTAAAAGGGCGGTGTGCTACAGC (SEQ ID | 385 | 420 | 36 |
| | | NO: 67) | | | |
| | DR | GTTTCACTCTCCGGTAAAAGGGCGGTGTGCTACAGC (SEQ ID | 451 | 486 | 36 |
| | | NO: 67) | | | |
| 0315296_{—} | IntCas9 | GTGGTCGTGAGGCCACAAGGCAAGCTGGACCATATTCCTATCC | 3976 | 6303 | 2328 |
| 10011343 | | CTAAACCTGAGCGAGGAGGCATTACAATTCGGTCCGAGAACG | | | |
| | | TGCTGGGGATTGACTTCGGGCCGGAGCACGTGGGGCTGGCCTT | | | |
| | | GGTGCGGCGGGAGCCGGCCGGGGAGCAGGTGCTCTACGCGGC | | | |
| | | TTCCATCACCTTGCGCGACCTGTCCCCGGTGATGAAGGAGCGC | | | |
| | | CGCGCTCTCAGGCGGCAGCGGCGCTCTGAGTCATGGTACCGCC | | | |
| | | AGCCCAGGGTCCCGCAGCGGGGCGGGGGCAGCGCGCGGGGAG | | | |
| | | CCGGGGCCCAGGAAGATGAGCAGGCCGTCGAGGGTGTGCCGG | | | |
| | | AAGAGGAGGAGGAGGATCGAAGTCGTGCGCGGTCCGCTCCCG | | | |
| | | AGTACCGGCGGGCGCAGGGATGCAATAAGCCCAAGCGAAAGT | | | |
| | | GCAAGTATGTTGACCCCAAGACCGGCGAGGTCTGCGGGGCCA | | | |
| | | ACACCCCTCGCAAGGAGAAGGTGCGAGACCTGCTGCTGTGGG | | | |
| | | ACATCTGCCAGCACTTGCCGGTGGAACCTGAGCAGCGCCTTGC | | | |
| | | CATCCTCAGCTACGTCAATCAGGTCAATATTGTCCGCCCGGAA | | | |
| | | GTGCTGGCGTGCCTTGCCCTGGAAGAGCGGGCCTTGCTGGAAA | | | |
| | | ACCATCGAGCTCTGGCCCGCGCTTCGAAGAGCAAGCCTCTCCC | | | |
| | | CCAGCTTCTCTGCGAACTGAAGATCAAGAAACAGTTACAATCC | | | |
| | | CAGATTCTGGCGATCGCCAGCGGAGACCCCGAACGCAAAGCC | | | |
| | | GCCGACCTCAAGGGGCGGATGGCCTTCTGCCGCAAGCATTTTC | | | |
| | | TCCTTCACCACCAACAGACCAGGATTCCCAAGCCCTCCGCCTG | | | |
| | | GCTTCCGCCCAGTATCCGGTGTCGGCACGCCGACCTGGAGAGG | | | |
| | | GTCTGCCGGGAGGAGGTCGCCCCCCGCTGGCCGGTCCACCGGA | | | |
| | | TCAGGCTGGAGCGGGCGCAGTTCGACCTGCAGGCCATTCAGCG | | | |
| | | AGATCCCCAGGGGCGGGGTAAGGACTGGGACCCCGAGGAGTG | | | |
| | | GCAGCGAGGTCCTTGTTGGGGCCGGCGCAATATCTACTCGGCG | | | |
| | | AAGCGGCATGAACAGGGTAACCGCTGCGCCTATTGCGGAAAA | | | |
| | | GAACCCAAGAAAGAGAACCGATTAGAGCTCGAGCACGTTAAA | | | |
| | | CCGGGTGGCGGCAATACTTGGGATAACCTGGTGCTGGCCTGCC | | | |
| | | GTAAGTGCAACCAACGCAAGGGGAAGGCTGAGGCCCGGGGTG | | | |
| | | CCGGTCTTAAGTTCTCTGTTGACCCCGATACAGGAGTGAGTCT | | | |
| | | GGCTCCCAGGGGATTGGGAGAGTCCGTGGTGGCCCGGTACAT | | | |
| | | GACCCAGACCGACCAGGGATACCGGGAGCTGGTGGCTCGCCT | | | |
| | | GCAGCAATTGTTCCCCGACGCCCAGATCGAGTACCGCTACGGC | | | |
| | | TATCAGACGGATCATATTCGTAAACGGTGGATCGGCTCGGCCC | | | |
| | | AGTTTGCGGAGACCGCTTTGTCACTCGGCTACAAACAGTCGCC | | | |
| | | GCCGCGGCCGAAGAAACGCCGAAAGCAGTGGAGCGAATTGGC | | | |
| | | GCATCTGAAGCGCAAACCCAGGCGACACAGCGATCCCCTCAA | | | |
| | | AAGTCATGTGATGGACGCGGTCGCGATAGCCGGTTCTCTCCAG | | | |
| | | CGGGATTCTCCGCCGGAGCTTTGCCAGGCCGATAAGATAACCA | | | |
| | | TCCGCCCTTCCCGGCGTCAACTTTTCGACACCAACCCCCTGGG | | | |
| | | GCGCGGGAGCGACGGCAGGTTCTACCAGCGTGTTAAGATTTGC | | | |
| | | GGGACCCAGGGAGGCCTCTCGTTTCGCAGAGTTAAACACGTGG | | | |
| | | TTGACGCTCGCAAGCGGGCTATTTTGGAGCGCGTCCGTGACCT | | | |
| | | GCTGATCGAGCAGGCTAAGGGCAACGAGGAATCCCCGCCCAG | | | |
| | | CGCCTTCACCCCGGATGCTGCCCAGCTGATCCCCTTCACCTCTG | | | |
| | | TTCGCTTGGCCAAACGAGACGCCTCCAAGACCAACACCCGGA | | | |
| | | GGTTACACGCGCCAGACGATGATCGTCTGCCCCAGCAGAAGG | | | |
| | | GCGGGCACTGGTACAAGGCTGCCGGTGGGCCCAATTGGGCCA | | | |
| | | CCGTGGTCTATCGGCTTGGCGGCCGTGAACAGGTGGCAGTACT | | | |
| | | GCGCAACCCGGCGGCTTTTCCAGACGCTTCTTCGGACATCCCG | | | |
| | | GCAGGCGCTCAGGTGCTCTTTTCCTTCCGAAAGGGAAAGTTGG | | | |
| | | TTTCCTTTGAGCAGGATGGGCAAACAACGCGCGCCCGAATCAC | | | |
| | | CAAGAACAACAGCGACGGCACTCTAACCGTCGAACGCCTCGA | | | |
| | | CGACGGCCGGGAAGTGACCCGGTCAGCTCGCTGCTTTCGCCCC | | | |
| | | GTCCCCCTGCTAGCGCCCAACGCCTGA (SEQ ID NO: 68) | | | |
| | Tracr | GGAGAGTGAAAAAAGCTCAGCCAAGGGAGACCCCGCGGGAA | 3789 | 3955 | 167 |
| | | ACCGCCAGGGGCTACCGTCAGGAGGCAAGTTTGGGGAATAGG | | | |
| | | TAGGGGTAACCCTAAGTGCAACCTGGGGTGCGCCTTCAGCTCC | | | |
| | | AGGCTCTGCAGGGTCCGGCCCAGAGGACTAACGCCCTAACG | | | |
| | | (SEQ ID NO: 69) | | | |
| | DR | GTTTCACTCTCCGGTAAAAGGGCGGTGTGCTACAGC (SEQ ID | 3222 | 3257 | 36 |
| | | NO: 67) | | | |
| | DR | GTTTCACTCTCCGGTAAAAGGGCGGTGTGCTACAGC (SEQ ID | 3288 | 3323 | 36 |
| | | NO: 67) | | | |
| | DR | GTTTCACTCTCCGGTAAAAGGGCGGTGTGCTACAGC (SEQ ID | 3355 | 3390 | 36 |
| | | NO: 67) | | | |
| | DR | GTTTCACTCTCCGGTAAAAGGGCGGTGTGCTACAGC (SEQ ID | 3421 | 3456 | 36 |
| | | NO: 67) | | | |
| | DR | GTTTCACTCTCCGGTAAAAGGGCGGTGTGCTACAGC (SEQ ID | 3487 | 3522 | 36 |
| | | NO: 67) | | | |
| | DR | GTTTCACTCTCCGGTAAAAGGGCGGTGTGCTACAGC (SEQ ID | 3553 | 3588 | 36 |
| | | NO: 67) | | | |
| | DR | GTTTCACTCTCCGGTAAAAGGGCGGTGTGCTACAGC (SEQ ID | 3619 | 3654 | 36 |
| | | NO: 67) | | | |
| | DR | GTTTCACTCTCCGGTAAAAGGGCGGTGTGCTACAGC (SEQ ID | 3685 | 3720 | 36 |
| | | NO: 67) | | | |
| a0315307_{—} | IntCas9 | GTGAGTACGAGTGCAGGCGAGTGTGTGCTCGGCCTGGACTTCG | 10001 | 12067 | 2067 |
| 1000415 | | GGCCGAAGCACGCTGGGCTCGCGGTGGTCCTGCGGGGTCCCTC | | | |
| | | GGCCGACGAAGTGGTGTTCGCCGGGGAGGTGCGTTTGCGCGCC | | | |
| | | CTGAAGGCCTTACGCTCTGACCGGAAAACCCCACTCTCCGAGC | | | |
| | | GGAAGACCATACTCGGCGTCCGGCGGGCCTTGCGCCGCAGTCG | | | |
| | | CCGCAGCCGCAAGCGCTACCGCCAGCCGAAGATTCCCCAGCG | | | |
| | | CGGCGGCGGGGCCACCACAGATACCCCGGAGAACACCAGTGC | | | |
| | | CGCCAGGGGCCGCCCTCCCGAGTACCGTCGCGCCACCGGCCTC | | | |
| | | AACACAGGCCGAAGACGCTGCAAGTTCACGGACCCCACCACC | | | |
| | | GGCGAAGTCTGCGCCGTGAACACCCCCCGCAAGACCAACGTG | | | |
| | | CGCGACCTGCTGCTCTGGAACATCTGCCGTCACCTTCCCGTGTC | | | |
| | | TCTTGCAGAGCGCGCCGCCTTTGTGTCCTACGTCAACCAGCGC | | | |
| | | AACCTCCAACAGGGTGAAGTGCTGGACGCGCTTCCGGCAGCG | | | |
| | | GACCAGGCCGCGCTTCAGGCCGTCTTTGCTCAGCAGCGCAAGC | | | |
| | | CCAAGCAGGAACCCCTTGCCGCGCGAATGCGTCGCCTGGGAGT | | | |
| | | TGACCGCCACCTGCGCTCACAGATCACGGACATTGTGGGCACT | | | |
| | | ACCTCACGCCGGCCCCTCAGCGGCAGGCTCTCGTTCTGTCGGC | | | |
| | | AGCACTTCCTCCGCCACCACGAGCAGACCCGAGTAGCCCGTCC | | | |
| | | GAGCGTGTGGCTTCCTACTACCATAGAGATGAAGCACGCGGAT | | | |
| | | GTCCTCCGCGTGTGCGGCCAAGAGATCGCGCCCAGGTGGCAG | | | |
| | | GTGCGCCGAATCGTGCTGGAGCGCGCGGGCTTCGACCTTCAGC | | | |
| | | TCCTGCGGCAGCAAGTATCCTTGGAGTGGAGAGTGGAGGACT | | | |
| | | GGCAGCGAGGGCCCCGCTGGGGCTACCGGAATACCTTCGAGG | | | |
| | | CGAAGAAGCAGGACCAAGGCAACCGCTGCGCCTACTGCGGGA | | | |
| | | AGAAGCCGTCACGCGAGAACCGATTTGAGCTGGAGCATGTGG | | | |
| | | CCCCTGGCGGCGGCGATTCCTGGGAGAACCTGGTGCTCAGTTG | | | |
| | | CCGCGCCTGCAACCAGCGCAAAGGGAGTCGAAGTCCCGCCGA | | | |
| | | GGCCGGAATGCTCTTCTGGGCGGACACCGAAACCGGAGAGAC | | | |
| | | CCTGGCCCCGCTATCTCTCGGCCTGTCACGCGTGGCCCGCTAC | | | |
| | | ATGACCCAGACTGACCAGGGCTGGCGCAGGCTGGAGGCTTCG | | | |
| | | CTGCGGAGGCTGTTCCCAGGTGCAGAGGTGGAGTACACTTGGG | | | |
| | | GGTATCAGACTAGCTTCTACCGCAACCGCTGGGGCCTGCCCAA | | | |
| | | GAAGCACTACGCTGACGCCGCGGTCATTGCCAGCTCTCACCAA | | | |
| | | CTGGAGCGCAAGCTCGCGCTTCCCGAGCAGCCGAAGCGCTTCG | | | |
| | | CGCCCGCGCCAGGCGGCAAGCGGCTCTTCGACACGAACCCGCT | | | |
| | | CGCGCGCGAACCCGACGGCCACTTCACCCAGCGGCAGAAGCT | | | |
| | | GGTGAGCGAGCAGGGAGGGCTGACGTTCGCCGAAGTCCCACG | | | |
| | | CGTGGAGAACCCGCGGAAGCGGAAGCTACTCCAGGCCGCAGC | | | |
| | | CGACAAGGCAATAGCCGAGGCCGCCGCCAAAGGAGAGAAGCC | | | |
| | | GCCGGCGGCGTTCACTGCGGCGATGCTTGCTGGCCTTCCGTTC | | | |
| | | AACTCAGTCCGCCTCACCAAGCCCGACGCGCAGGAGCGCAAT | | | |
| | | ACCCGACAGCTAGGGCAGCAGTGGTTCAAAGTCGCGGGGGGC | | | |
| | | CCCAACGTCGCCACCATCCTCTACGAACACAACGGCAACCAGG | | | |
| | | CCACCCTCGTCAAACGGAACCCCGCTATCTTCCGCGCTGACCC | | | |
| | | AGGCCTGCCCAGAGGGGCGCGCGTTCTTGCGGTCTACCGCAAA | | | |
| | | GGTGACTTCGTGGAGTGCAGCGACGGCCTGGGCCGGGTGACG | | | |
| | | AAGAACCACAGCAACGGCACTCTAACTGTCGAACTGGTGGAT | | | |
| | | ACAGGAAAGGCGGTGACGCGGCAGGCCAAGTCGTTCCGGCCG | | | |
| | | GCGCGCAAGCCGCCGCGAGGATAG (SEQ ID NO: 70) | | | |
| | Tracr | GAAGGGCGAAAACAGCCCAGCCAAGACTCGCCGCGGACAGGC | 9668 | 9887 | 220 |
| | | CTGGTAGCACAGGACTGAGCCGGTGTGGCGAGCGCGGGAAAC | | | |
| | | CGGCGGGGAAACTCGGCCGGCTACCGTCAGGAGGCACGTTTG | | | |
| | | GGGAACAGGTAGGGGCAACCCTGAGTGCAACCTGGGGTGCAC | | | |
| | | CTTCAGCTCCAGGCTCTGCAAGGCTCGGCCCAGAGGGACTAAC | | | |
| | | GCCCTAATC (SEQ ID NO: 71) | | | |
| | DR | TTTCGCCCTCGCGCTGGTGGACACGGTG (SEQ ID NO: 72) | 9077 | 9104 | 28 |
| | DR | TTTCGCCCTCGCGCTGGTGGACACGGTG (SEQ ID NO: 72) | 9138 | 9165 | 28 |
| | DR | TTTCGCCCTCGCGCTGGTGGACACGGTG (SEQ ID NO: 72) | 9200 | 9227 | 28 |
| | DR | TTTCGCCCTCGCGCTGGTGGACACGGTG (SEQ ID NO: 72) | 9261 | 9288 | 28 |
| | DR | TTTCGCCCTCGCGCTGGTGGACACGGCG (SEQ ID NO: 73) | 9322 | 9349 | 28 |
| | DR | TTTCGCCCTCGCGCTGGTGGACACGGCT (SEQ ID NO: 74) | 9383 | 9410 | 28 |
| | DR | TTTCGCCCTCGCGCTGGTGGACACGGCG (SEQ ID NO: 73) | 9444 | 9471 | 28 |
| | DR | TTTCGCCCTCGCGCTGGTGGACACGGTG (SEQ ID NO: 72) | 9505 | 9532 | 28 |
| | DR | TTTCGCCCTCGCGCTGGTGGACAGGGCG (SEQ ID NO: 75) | 9566 | 9593 | 28 |
| a0315541_{—} | IntCas9 | ATGCCGAACGTGCTGGGGATAGATTTGGGCGGCAAAGCCGTG | 10001 | 11920 | 1920 |
| 1000067 | | GGGCTCGCCGTGGTGGAGCAGCCGGACAACCGCGTTGCATGG | | | |
| | | TGCGGGACCGTCCACCTTTCCGACAGGATCAAGGATCTGTACG | | | |
| | | ACCAGCGCCGGACGCTGCGCCGGGGCCGGCGCTCACGCGTGC | | | |
| | | GTTACCGCAAGCCCAAAGTTGCCGAACGGGGTGGCGGCTCGG | | | |
| | | CCGGTCAGACTCAGTGGAGCGGATTCAAATACCGCCGGGCCA | | | |
| | | AGGGGCTCAACCAGTCACTCCGGACCAAGTGCAAGTACGTCG | | | |
| | | ACCGGGAAACCGGCGAAGTCTGCGAACGGAACACGCCAAAGA | | | |
| | | AGGCCAATGTCCGCCATCTCCTTATCCAGGACATCCTGAGCTT | | | |
| | | TCAGCCGTTCGCCGAGGTGCCGCCGGATCACAGACAGGTCATC | | | |
| | | CGCGATGTCCTTGCCTCGCGCGAAGGTGCAGGAACCCGGCGTA | | | |
| | | AGCGGCTCCAGAACATCCTCAGCCGGCTCAACGTGGACACTTA | | | |
| | | CCTCAAGAAGCAGGTCGACGACATCTGCTTCAACGATCTCCCC | | | |
| | | GGCCGGGCCGAATTCTGCCGCAAACACATCCTCGCTCACCATG | | | |
| | | AGCAGACGGACATACCGGCACAGGCCGTTTGGCTCCCGCCATC | | | |
| | | GATCCGCCTAAAGCAGGACTTTGTCCTGAAGCAGATTCGGGTT | | | |
| | | CTGTCGCGCCGATTCCGTATCGACAAGATCGTCATCGAGCGGG | | | |
| | | CGAACTTCGACCTCCAGAAGATTGCGGCGGGAGTGATCGATG | | | |
| | | ATCCGGCGGAATATCAGGAAGGTCACCGCTACGGCTTCCGGA | | | |
| | | ACACCCGCGCGGCGATGATGCAGGAGTACGGGGCGCGGTGCT | | | |
| | | GCTATTGCGGCAAGAGCGTGGTAGGCAAGAAGTGGCACCTTG | | | |
| | | ACCACATCGAGCCCAAGAAGACCGGCGAGATCAACCGCTGGG | | | |
| | | ATAATCTGGCCATCGCCTGCGAAAAGTGCAATCAGCGGAAGG | | | |
| | | GCAGCAGGACACCCACGGAGGCGGGCATGTCCTTCGCCGTCGT | | | |
| | | TTCCGAAAACATCGCGGGCAGGCGGATCAGGCGCTCATTGGC | | | |
| | | GCCCAAGCCCGTGGAGGGCGGCCGCATCCACAAGTACATGAC | | | |
| | | ACAGACCGATCAAGGCATCCGCATCCTGAAGCGCAACCTGGG | | | |
| | | GGCAATCATCCCCCATGCACCCATCGAAGAAACGTTCGGCTAC | | | |
| | | GACACCGCGGCCTGGCGGGGCGTGTGGGGCCTGGAGAAAGGC | | | |
| | | AAGGAGAAGGGGGAACATCACAACGACGCAATTGTCATCGCC | | | |
| | | TCGCTGCGGTCACCGGAGGCGGGGCCGATCATCGAAGTGGAC | | | |
| | | CCGGAAGTGAGCCGCCAGGCTGTCGGCGGGAAGCGGATATTC | | | |
| | | GACCAGAACCCCATCCAGCGCGCAGGCGACGGCAACCACTAT | | | |
| | | CAGAGGATCCCGGTCGTCGCCGAGGTCGGCGGCATCACGCCG | | | |
| | | AGACAACTCCGGGCCGTGGTGGACGAACAGAAGAGGGCGCTC | | | |
| | | CTGGCACGCGAGTTCGAGCGGCTCGAGATCAAGGGGAATCGG | | | |
| | | TCGCTTCCGGATAGGGCCCGCCAGCGCTTGCCCTTCAAGAGCG | | | |
| | | TCCGCCTCCGCAAAAGAGACTGCACGGACGAGAACGTTCGCA | | | |
| | | CGATGAAAAGCGGGCACCGCTTCAAGGTCTCCAACGTCGGCG | | | |
| | | GGACGCGCGTCAACGAGGCACTGGTCGTGTACCGCACACATG | | | |
| | | CGGGGAAGGTAGCGTGCTATCCGATGAAGAACCGGCGTGCCT | | | |
| | | TCGGGCCTACACTTCCGCCAGCGGACTTTGAAAAGGAGCTTAG | | | |
| | | GCGTTTCAGGCCCGCCGACGCGGTATACGAGGCTGGGGGGAA | | | |
| | | GGAACTAGGGCGGATCGTCGTTCTCTGGAGCAGCGGTCGCGTG | | | |
| | | AAGCTGGACAGTGGGGTAACCAGGGCGGCGACCAAATGCTTG | | | |
| | | AAAGGAGGTGGTTGA (SEQ ID NO: 76) | | | |
| | Tracr | CTAGGTCAAAAGCACGCCTCAGCGATTCCCCGACTGTTCGGGG | 12378 | 12562 | 185 |
| | | AAGCCAGGGAACCCAACGAAAGGCGGGACCTGGCCAGGAGCT | | | |
| | | ACGTTTGCAGGACAGCCAAAGACCTATGCCGGGATGTAGTGCC | | | |
| | | TCGTCTACCCAGTCCCGGCCTCTTGGAGTCTCGGCCCGGAAGA | | | |
| | | TTAACGCCCTCGCC (SEQ ID NO: 77) | | | |
| | DR | GGTCGCAGCGTGCATGGGATGAAT (SEQ ID NO: 78) | 11945 | 11968 | 24 |
| | DR | TGGCCTCGCGTGCATGGGATGAAT (SEQ ID NO: 79) | 12006 | 12029 | 24 |
| | DR | TGGCCTCGCGTGCATGGGATGAAT (SEQ ID NO: 79) | 12067 | 12090 | 24 |
| | DR | TGGCCTCGCGTGCATGGGATGAAT (SEQ ID NO: 79) | 12130 | 12153 | 24 |
| | DR | TGGCCTCGCGTGCATGGGATGAAT (SEQ ID NO: 79) | 12190 | 12213 | 24 |
| | DR | TGGCCTCGCGTGCATGGGATGAAT (SEQ ID NO: 79) | 12251 | 12274 | 24 |

TABLE 14
Geneious Features and Annotations for SEQ ID NOs: 80-92 (See also Appendix A of U.S. Provisional Application No. 62/962,672)

| SEQ | | | |
|---|---|---|---|
| ID | | | |
| NO: | Name | Features | Location/Qualifiers |
| 80 | 0315296_10011343_organized | Padding | <1..6024 |
| | (Accession | | |
| | 0315296_10011343) | | |
| | | CDS | 6026..7423 /product=“orf(7,281647,11342,0)$zz$Partial ORF @ 1-1399” |
| | | Annotated | complement(6026..8092) |
| | | | /product=“−> pfam01074(7,315)[87.0] \| |
| | | | pfam07748(438,689)[50.7] \| pfam09261(328,405) |
| | | | [33.4] \| COG0383(3,162)[110.4] \| COG0383(291,526)[24.4] : |
| | | | A(7,281647,11342,0)$zz$alpha-mannosidase/ mannosylglycerate |
| | | | hydrolase & KO:K01191,KO:K15524” |
| | | Questional_CDS | 6045..6320 |
| | | | /product=“orf(7,281647,11342,2)$zz$Partial ORF @ 20-296” |
| | | Questional_CDS | complement(6259..6465) |
| | | | /product=“orf(7,281647,11342,3)$zz$ORF @ 234-441” |
| | | Questional_CDS | complement(6462..7202) |
| | | | /product=“orf(7,281647,11342,4)$zz$ORF @ 437-1178” |
| | | Questional_CDS | 7451..8110 |
| | | | /product=“orf(7,281647,11342,5)$zz$ORF @ 1426-2086” |
| | | Questional_CDS | complement(7735..8148) |
| | | | /product=“orf(7,281647,11342,6)$zz$ORF @ 1710-2124” |
| | | Questional_CDS | 8220..8477 |
| | | | /product=“orf(7,281647,11342,7)$zz$ORF @ 2195-2453” |
| | | Annotated | 8389..8916 |
| | | | /product=“−> pfam01467(40,168)[58.6] \| |
| | | | COG2870(4,173)[186.2] : |
| | | | A(7,281647,11342,1)$zz$D-beta-D-heptose 7-phosphate kinase/D-beta-D-heptose 1- |
| | | | phosphate adenosyltransferase & |
| | | | KO:K03272” |
| | | Questional_CDS | complement(8404..9108) /product=“orf(7,281647,11342,9)$zz$ORF @ 2379-3084” |
| | | | Questional_CDS 8913..9089 |
| | | | /product=“orf(7,281647,11342,10)$zz$ORF @ 2888-3065” |
| | | DR | 9247..9281 |
| | | DR | 9313..9347 |
| | | DR | 9380..9414 |
| | | DR | 9446..9480 |
| | | Questional_CDS | 9488..9697) /product=“orf(7,281647,11342,11)$zz$ORF @ 3463-3673” |
| | | DR | 9512..9546 |
| | | DR | 9578..9612 |
| | | DR | 9644..9678 |
| | | DR | 9710..9744 |
| | | POI | 10000..12327 |
| | | | /product=“−> IscB(28,91)[44.2] \| IscB(278,568) [92.9] \| |
| | | | pfam14279(364,412)[41.5] \| pfam14239(21,101) |
| | | | [36.7] \| |
| | | | COG1403(277,421)[24.1] : |
| | | | A(7,281647,11342,2)$zz$5-methylcytosine-specific |
| | | | restriction endonuclease McrA & COG1403” |
| | | Annotated | 10000..12327 |
| | | | /product=“−> IscB(28,91)[44.2] \| IscB(278,568) |
| | | | [92.9] \| pfam14279(364,412)[41.5] \| pfam14239(21,101) [36.7] \| |
| | | | COG1403(277,421)[24.1] : |
| | | | A(7,281647,11342,2)$zz$5-methylcytosine-specific |
| | | | restriction endonuclease McrA & COG1403” |
| | | Questional_CDS | complement(10161..10553) |
| | | | /product=“orf(7,281647,11342,13)$zz$ORF @ 4136-4529” |
| | | Questional_CDS | complement(10243..10641) |
| | | | /product=“orf(7,281647,11342,14)$zz$ORF @ 4218-4617” |
| | | Questional_CDS | 10313..10699 |
| | | | /product=“orf(7,281647,11342,15)$zz$ORF @, 4288-4675” |
| | | Questional_CDS | complement(10714..11073) |
| | | | /product=“orf(7,281647,11342,16)$zz$ORF @ 4689-5049” |
| | | Questional_CDS | complement(11094..11318) |
| | | | /product=“orf(7,281647,11342,17)$zz$ORF @, 5069-5294” |
| | | Questional_CDS | 11128..11418) |
| | | | /product=“orf(7,281647,11342,18)$zz$ORF @ 5103-5394” |
| | | Questional_CDS | 11978..12241 |
| | | | /product=“orf(7,281647,11342,19)$zz$ORF @ 5953-6217” |
| | | CDS | complement(12138..12749) |
| | | | /product=“A(7,281647,11342,3)$zz$hypothetical |
| | | | protein” |
| | | Questional_CDS | complement(12141..12731) |
| | | | /product=“orf(7,281647,11342,20)$zz$Partial ORF @ 6116-6707” |
| | | Questional_CDS | 12332..12748 |
| | | | /product=“orf(7,281647,11342,22)$zz$Partial ORF @ 6307-6724” |
| 81 | 0272441_10020685_organized | Padding | <1..5667 |
| | (Accession | | /label |
| | 0272441_10020685) | | |
| | | Questional_CDS | 5669..5995 /product=“orf(4,280925,20684,0)$zz$Partial ORF @ 1-328” |
| | | Questional_CDS | complement(5669..6163) |
| | | | /product=“orf(4,280925,20684,1)$zz$Partial ORF @ 1-496” |
| | | Annotated | 5670..6428 |
| | | | /product=“−> pfam02347(2,249)[238.0] \| |
| | | | COG0403(1,253)[276.0] : |
| | | | orf(4,280925,20684,2)$zz$Partial |
| | | | ORF @ 2-761” |
| | | Annotated | 5670..6431 |
| | | | /product=“−> pfam02347(2,249)[238.0] \| |
| | | | COG0403(1,253)[276.0] : |
| | | | A(4,280925,20684,0)$zz$glycine |
| | | | dehydrogenase subunit 1 & KO:K00282” |
| | | Questional_CDS | complement(5670..6410) |
| | | | /product=“orf(4,280925,20684,3)$zz$Partial ORF @ 2-743” |
| | | | CDS complement(6329..8542) |
| | | | /product=“orf(4,280925,20684,4)$zz$ORF @ |
| | | | 661-2875” |
| | | Annotated | 6428..7876 |
| | | | /product=“−> pfam02347(17,308)[33.4] \| |
| | | | COG1003(4,481)[610.4] : |
| | | | A(4,280925,20684,1)$zz$glycine |
| | | | dehydrogenase subunit 2 & KO:K00283” |
| | | CDS | 6640..8136 |
| | | | /product=“orf(4,280925,20684,6)$zz$ORF @ |
| | | | 972-2469” |
| | | Questional_CDS | complement(6748..7059) |
| | | | /product=“orf(4,280925,20684,7)$zz$ORF @ |
| | | | 1080-1392” |
| | | Questional_CDS | complement(7660..7911) |
| | | | /product=“orf(4,280925,20684,8)$zz$ORF @ |
| | | | 1992-2244” |
| | | Questional_CDS | 7737..8072) |
| | | | /product=“orf(4,280925,20684,9)$zz$ORF @ |
| | | | 2069-2405” |
| | | Questional_CDS | complement(7978..8163) |
| | | | /product=“orf(4,280925,20684,10)$zz$ORF @ |
| | | | 2310-2496” |
| | | CDS | 8063..9379 |
| | | | /product=“A(4,280925,20684,2)$zz$hypothetical |
| | | | protein” |
| | | Questional_CDS | 8430..8795 |
| | | | /product=“orf(4,280925,20684,12)$zz$ORF @ |
| | | | 2762-3128” |
| | | Questional_CDS | 8612..9799) |
| | | | /product=“orf(4,280925,20684,13)$zz$ORF @ |
| | | | 2944-4132” |
| | | Questional_CDS | 8820..9194 |
| | | | /product=“orf(4,280925,20684,14)$zz$ORF @ |
| | | | 3152-3527” |
| | | Questional_CDS | 9855..10052) |
| | | | /product=“orf(4,280925,20684,15)$zz$ORF @ |
| | | | 4187-4385” |
| | | Questional_CDS | complement(9958..11097) |
| | | | /product=“orf(4,280925,20684,16)$zz$ORF @ |
| | | | 4290-5430” |
| | | POI | 10000..11937 |
| | | | /product=“−> IscB(4,486)[180.3] \| |
| | | | pfam01844(285,330)[40.5]\| pfam14239(2,72)[40.4] \| |
| | | | pfam14239(132,265)[33.1] \|COG1403(188,350)[46.3] |
| | | | :A(4,280925,20684,3)$zz$5-methylcytosinespecificrestriction |
| | | | endonuclease McrA & COG1403” |
| | | Annotated | 10000..11937 |
| | | | /product=“−> IscB(4,486)[180.3] \| |
| | | | pfam01844(285,330)[40.5]\| pfam14239(2,72)[40.4] \| |
| | | | pfam14239(132,265)[33.1] \|COG1403(188,350)[46.3] |
| | | | :A(4,280925,20684,3)$zz$5-methylcytosinespecificrestriction |
| | | | endonuclease McrA & COG1403” |
| | | Questional_CDS | complement(10857..11267) |
| | | | /product=“orf(4,280925,20684,18)$zz$ORF @ |
| | | | 5189-5600” |
| | | Questional_CDS | 10901..11107 |
| | | | /product=“orf(4,280925,20684,19)$zz$ORF @ |
| | | | 5233-5440” |
| | | Questional_CDS | complement(11224..12135) |
| | | | /product=“orf(4,280925,20684,20)$zz$ORF @ |
| | | | 5556-6468” |
| | | Questional_CDS | complement(11907..12320) |
| | | | /product=“orf(4,280925,20684,21)$zz$ORF @ |
| | | | 6239-6653” |
| | | Questional_CDS | complement(11927..12178) |
| | | | /product=“orf(4,280925,20684,22)$zz$ORF @ |
| | | | 6259-6511” |
| | | DR | 12012..12039 |
| | | DR | 12073..12100 |
| | | DR | 12134..12161 |
| | | DR | 12195..12222 |
| | | DR | 12257..12284 |
| | | DR | 12319..12346 |
| | | DR | 12380..12407 |
| | | DR | 12441..12468 |
| | | Questional_CDS | 12489..12938 |
| | | | /product=“orf(4,280925,20684,23)$zz$ORF @ |
| | | | 6821-7271” |
| | | Questional_CDS | complement(12650..12838) /product=“orf(4,280925,20684,24)$zz$ORF @ |
| | | | 6982-7171” |
| | | Questional_CDS | 12677..12868 |
| | | | /product=“orf(4,280925,20684,25)$zz$ORF @ |
| | | | 7009-7201” |
| | | CDS | 12948..13382 |
| | | | /product=“A(4,280925,20684,4)$zz$hypothetical |
| | | | protein” |
| | | Questional_CDS | complement(13010..13399) |
| | | | /product=“orf(4,280925,20684,27)$zz$ORF @ |
| | | | 7342-7732” |
| | | Questional_CDS | 13277..13789 |
| | | | /product=“orf(4,280925,20684,28)$zz$ORF @ |
| | | | 7609-8122” |
| | | CDS | 13387..13623 |
| | | | /product=“A(4,280925,20684,5)$zz$hypothetical |
| | | | protein” |
| | | Questional_CDS | 13389..14006 |
| | | | /product=“orf(4,280925,20684,29)$zz$ORF @ |
| | | | 7721-8339” |
| | | Questional_CDS | complement(13563..14405) |
| | | | /product=“orf(4,280925,20684,30)$zz$Partial ORF @ 7895-8738” |
| | | Questional_CDS | 13705..13920 |
| | | | /product=“orf(4,280925,20684,31)$zz$ORF @ |
| | | | 8037-8253” |
| | | CDS | complement(13898..14404) |
| | | | /product=“A(4,280925,20684,6)$zz$hypothetical |
| | | | protein” |
| | | Questional_CDS | complement(13901..14404) |
| | | | /product=“orf(4,280925,20684,32)$zz$Partial ORF @ 8233-8737” |
| 82 | 0209343_10010378_organized | Padding | <1..5585 /label |
| | (Accession | | |
| | 0209343_10010378) | | |
| | | Annotated | 5586..5999 |
| | | | /product=“−> pfam01927(1,134)[113.5] \| |
| | | | COG1656(1,138)[106.6] : |
| | | | orf(18,34854,10377,0)$zz$Partial ORF @ 0-414” |
| | | Annotated | 5586..6002 |
| | | | /product=“−> pfam01927(1,134)[113.5] \| |
| | | | COG1656(1,138)[106.6] : |
| | | | A(18,34854,10377,0)$zz$hypothetical protein” |
| | | Questional_CDS | 5869..6084 |
| | | | /product=“orf(18,34854,10377,1)$zz$ORF @ 283-499” |
| | | CDS | complement(6007..6675) |
| | | | /product=“A(18,34854,10377,1)$zz$hypothetical |
| | | | protein” |
| | | CDS | complement(6742..7347) |
| | | | /product=“A(18,34854,10377,2)$zz$hypothetical |
| | | | protein” |
| | | CDS | complement(7357..7695) |
| | | | /product=“A(18,34854,10377,3)$zz$hypothetical |
| | | | protein” |
| | | Questional_CDS | 7526..7708 |
| | | | /product=“orf(18,34854,10377,5)$zz$ORF @ |
| | | | 1940-2123” |
| | | Annotated | 7892..8260 |
| | | | /product=“−> pfam14489(45,122)[107.9] \| COG0780(1,122)[141.0] : |
| | | | A(18,34854,10377,4)$zz$7-cyano-7-deazaguanine reductase & KO:K09457” |
| | | Annotated | complement(8329..8664) |
| | | | /product=“−> pfam00512(30,94)[39.5] \| |
| | | | COG0642(1,110)[25.1]: |
| | | | A(18,34854,10377,5)$zz$signal |
| | | | transduction histidinekinase & COG0642” |
| | | Annotated | complement(8869..9876) |
| | | | /product=“−> pfam00933(5,328)[311.9] \| |
| | | | COG1472(4,334)[299.0] : |
| | | | A(18,34854,10377,6)$zz$beta-Nacetylhexosaminidase |
| | | | & KO:K01207” |
| | | Questional_CDS | 9392..9595 |
| | | | /product=“orf(18,34854,10377,9)$zz$ORF @ |
| | | | 3806-4010” |
| | | POI | 10000..11976 |
| | | | /product=“−> IscB(1,637)[196.2] \| pfam14239(1,74) [51.5] \| |
| | | | pfam14279(256,312)[35.7] \| pfam14239(175,236) [28.3] \| |
| | | | COG1403(221,320)[36.1] : |
| | | | A(18,34854,10377,7)$zz$5-methylcytosine-specific restriction endonuclease McrA & |
| | | | COG1403” |
| | | Annotated | 10000..11976 |
| | | | /product=“−> IscB(1,637)[196.2] \| pfam14239(1,74) [51.5] \| |
| | | | pfam14279(256,312)[35.7] \| pfam14239(175,236) [28.3] \| |
| | | | COG1403(221,320)[36.1] : |
| | | | A(18,34854,10377,7)$zz$5-methylcytosine-specific restriction endonuclease McrA & |
| | | | COG1403” |
| | | Questional_CDS | complement(10086..10451) |
| | | | /product=“orf(18,34854,10377,11)$zz$ORF @ |
| | | | 4500-4866” |
| | | Questional_CDS | complement(10552..10818 |
| | | | /product=“orf(18,34854,10377,12)$zz$ORF @ |
| | | | 4966-5233” |
| | | Questional_CDS | complement(10821..11102) |
| | | | /product=“orf(18,34854,10377,13)$zz$ORF @ |
| | | | 5235-5517” |
| | | Questional_CDS | complement(12050..12229) |
| | | | /product=“orf(18,34854,10377,14)$zz$ORF @ |
| | | | 6464-6644” |
| | | DR | 12281..12308 |
| | | DR | 12346..12373 |
| | | Questional_CDS | complement(12478..12723) |
| | | | /product=“orf(18,34854,10377,15)$zz$ORF @ 6892-7138” |
| | | CDS | 12502..12825 /product=“A(18,34854,10377,8)$zz$hypothetical |
| | | | protein” |
| | | CDS | 12822..13163 |
| | | | /product=“A(18,34854,10377,9)$zz$hypothetical |
| | | | protein” |
| | | Questional_CDS | 13070..13291) |
| | | | /product=“orf(18,34854,10377,18)$zz$ORF @ |
| | | | 7484-7706” |
| | | Annotated | 13160..13759 |
| | | | /product=“−> pfam02441(14,187)[96.0] \| |
| | | | COG0163(12,198)[232.5] : |
| | | | A(18,34854,10377,10)$zz$4-hydroxy-3- |
| | | | polyprenylbenzoate |
| | | | decarboxylase & KO:K03186” |
| | | Questional_CDS | 13725..13922 |
| | | | /product=“orf(18,34854,10377,20)$zz$ORF @ |
| | | | 8139-8337” |
| | | Annotated | complement(13767..15710) |
| | | | /product=“−> pfam09334(147,359)[206.8] \| |
| | | | pfam09334(4,151)[157.5] \| pfam01588(553,645) |
| | | | [94.8] \| pfam08264(398,572)[29.4] \| COG0143(1,528)[569.8] \| |
| | | | COG0073(532,647)[109.5] : A(18,34854,10377,11)$zz$methionyl-tRNA synthetase & |
| | | | KO:K01874” |
| | | Questional_CDS | complement(14837..15055) |
| | | | /product=“orf(18,34854,10377,22)$zz$ORF @ |
| | | | 9251-9470” |
| | | Questional_CDS | 15504..15770 |
| | | | /product=“orf(18,34854,10377,23)$zz$ORF @ |
| | | | 9918-10185” |
| | | Annotated | complement(15834..16187) |
| | | | /product=“−> pfam13277(1,113)[181.2] \| |
| | | | COG1692(1,117)[174.5] : |
| | | | A(18,34854,10377,12)$zz$hypothetical protein” |
| | | Annotated | complement(15837..16166) |
| | | | /product=“−> pfam13277(1,113)[181.2] \| |
| | | | COG1692(1,117)[174.5] : |
| | | | orf(18,34854,10377,24)$zz$Partial |
| | | | ORF @ 10251-10581” |
| 83 | 0315289_10046034_organized | Padding | <1..5657 |
| | (Accession | | /label |
| | 0315289_10046034) | | |
| | | CDS | complement(5660..5800) |
| | | | /product=“A(7,281640,46033,3)$zz$PEP-CTERM |
| | | | motif-containing protein & pfam07589” |
| | | Annotated | complement(5932..6750) |
| | | | /product=“−> pfam07963(1,26)[25.6] \| COG2165(1,40)[34.8] |
| | | | :A(7,281640,46033,2)$zz$type II secretory |
| | | | pathwaypseudopilin PulG & COG2165” |
| | | Questional_CDS | 6067..7056 |
| | | | /product=“orf(7,281640,46033,19)$zz$ORF @ |
| | | | 4099-5089” |
| | | Questional_CDS | complement(6101..6298) |
| | | | /product=“orf(7,281640,46033,22)$zz$ORF @ |
| | | | 4857-5055” |
| | | Questional_CDS | 6590..6991 |
| | | | /product=“orf(7,281640,46033,20)$zz$ORF @ |
| | | | 4164-4566” |
| | | Annotated | complement(7154..9592) |
| | | | /product=“−> pfam12804(9,233)[63.3] \| |
| | | | pfam10509(331,381)[48.7] \| pfam00288(459,525) |
| | | | [36.2] \| pfam08544(711,790)[28.0] \| COG0153(322,697) [146.5] \| |
| | | | COG1207(5,295)[125.8] \| COG0153(710,811)[38.9] : |
| | | | A(7,281640,46033,1)$zz$N-acetylgalactosamine |
| | | | kinase & KO:K18674” |
| | | Questional_CDS | 7290..7637 |
| | | | /product=“orf(7,281640,46033,18)$zz$ORF @ |
| | | | 3518-3866” |
| | | Questional_CDS | complement(7330..7761) |
| | | | /product=“orf(7,281640,46033,17)$zz$ORF @ |
| | | | 3394-3826” |
| | | Questional_CDS | 7975 |
| | | | /product=“orf(7,281640,46033,16)$zz$ORF @ |
| | | | 3180-3510” |
| | | Questional_CDS | complement(7857..8072) |
| | | | /product=“orf(7,281640,46033,15)$zz$ORF (a |
| | | | 3083-3299” |
| | | Questional_CDS | 8028..8255 |
| | | | /product=“orf(7,281640,46033,14)$zz$ORF @ 2900-3128” |
| | | Questional_CDS | 8923 |
| | | | /product=“orf(7,281640,46033,13)$zz$ORF @ |
| | | | 2232-2874” |
| | | CDS | complement(8361..9569) |
| | | | /product=“orf(7,281640,46033,11)$zz$ORF @ |
| | | | 1586-2795” |
| | | Questional_CDS | 9093..9290 |
| | | | /product=“orf(7,281640,46033,12)$zz$ORF @ |
| | | | 1865-2063” |
| | | Questional_CDS | 9468..9698 |
| | | | /product=“orf(7,281640,46033,9)$zz$ORF @ |
| | | | 1457-1688”' |
| | | Questional_CDS | complement(9619..9846) /product=“orf(7,281640,46033,8)$zz$ORF @ |
| | | | 1309-1537” |
| | | Questional_CDS | 9652..9969 |
| | | | /product=“orf(7,281640,46033,7)$zz$ORF @ |
| | | | 1186-1504” |
| | | Questional_CDS | 9695..9976 |
| | | | /product=“orf(7,281640,46033,6)$zz$ORF @ |
| | | | 1179-1461” |
| | | POI | 10000..11154 /product=“−> IscB(4,65)[51.3] \| IscB(205,334) |
| | | | [115.8] \| pfam01844(284,329)[38.9] \| pfam14239(2,72)[37.7] \| |
| | | | pfam14239(198,264)[36.1] \| COG1403(255,351) |
| | | | [48.7] : A(7,281640,46033,0)$zz$5-methylcytosine-specific restriction endonuclease |
| | | | McrA & COG1403” |
| | | Annotated | 10000..11154 |
| | | | /product=“−> IscB(4,65)[51.3] \| IscB(205,334) |
| | | | [115.8] \| pfam01844(284,329)[38.9] \| pfam14239(2,72)[37.7] |
| | | | \| pfam14239(198,264)[36.1] \| COG1403(255,351) |
| | | | [48.7] : A(7,281640,46033,0)$zz$5-methylcytosine-specific restriction endonuclease |
| | | | McrA & COG1403” |
| | | Questional_CDS | complement(10273..10674) |
| | | | /product=“orf(7,281640,46033,4)$zz$ORF @ 481-883” |
| | | Questional_CDS | 10346..10528 |
| | | | /product=“orf(7,281640,46033,5)$zz$ORF @ 627-810” |
| | | Questional_CDS | complement(10509..10718) |
| | | | /product=“orf(7,281640,46033,3)$zz$ORF @ 437-647” |
| | | Questional_CDS | 10553..11023 |
| | | | /product=“orf(7,281640,46033,2)$zz$ORF @ 132-603” |
| | | Questional_CDS | complement(10878..11102) |
| | | | /product=“orf(7,281640,46033,1)$zz$ORF @ 53-278” |
| 84 | 0265297_10050537_organized | Padding | <1..9999 |
| | (Accession | | /label |
| | 0265297_10050537) | | |
| | | POI | POI 10000..11835 |
| | | | /product=“−> IscB(174,603)[92.2] \| cas9(246,295) |
| | | | [35.4] \| |
| | | | pfam14279(249,304)[63.2] \| COG1403(222,306) |
| | | | [52.3] : |
| | | | orf(3,280701,50536,11)$zz$Partial ORF @ |
| | | | 1843-3679” |
| | | Questional_CDS | 10001..10183 |
| | | | /product=“orf(3,280701,50536,13)$zz$Partial ORF @ 3495-3678” |
| | | Questional_CDS | 10164..10418) |
| | | | /product=“orf(3,280701,50536,12)$zz$ORF @ |
| | | | 3260-3515” |
| | | CDS | complement(11852..13336) |
| | | | /product=“orf(3,280701,50536,2)$zz$ORF @ |
| | | | 342-1827” |
| | | Questional_CDS | 11907..12137 |
| | | | /product=“orf(3,280701,50536,10)$zz$ORF @ |
| | | | 1541-1772” |
| | | Questional_CDS | 12260..12553 |
| | | | /product=“orf(3,280701,50536,6)$zz$ORF @ |
| | | | 1125-1419” |
| | | Questional_CDS | 12268..12447 |
| | | | /product=“orf(3,280701,50536,9)$zz$ORF @ |
| | | | 1231-1411” |
| | | Questional_CDS | 12512 |
| | | | /product=“orf(3,280701,50536,8)$zz$ORF @ |
| | | | 1166-1397” |
| | | Questional_CDS | complement(12319..12519) |
| | | | /product=“orf(3,280701,50536,7)$zz$ORF @ |
| | | | 1159-1360” |
| | | Questional_CDS | complement(12444..12767) |
| | | | /product=“orf(3,280701,50536,5)$zz$ORF @ |
| | | | 911-1235” |
| | | Questional_CDS | 12738..12926 |
| | | | /product=“orf(3,280701,50536,4)$zz$ORF @ 752-941” |
| | | Questional_CDS | 13059..13259 |
| | | | /product=“orf(3,280701,50536,3)$zz$ORF @ 419-620” |
| | | Annotated | complement(13333..13677) |
| | | | /product=“−> pfam02369(7,104)[35.5] : |
| | | | A(3,280701,50536,0)$zz$Ig-like protein group 1 & pfam02369” |
| | | Annotated | complement(13336..13653) |
| | | | /product=“−> pfam02369(7,104)[35.5] : |
| | | | orf(3,280701,50536,1)$zz$Partial ORF @ 25-343” |
| | | Questional_CDS | complement(13367..13678) |
| | | | /product=“orf(3,280701,50536,0)$zz$Partial ORF @ 0-312” |
| 85 | 0315281_10072405_organized | Padding | <1..9998 |
| | (Accession | | /label |
| | 0315281_10072405) | | |
| | | POI | 10000..11496 |
| | | | /product=“−> IscB(18,374)[119.9] \| |
| | | | pfam14279(95,151)[32.1]\| COG1403(80,157)[36.2] |
| | | | :A(7,281632,72404,0)$zz$5-methylcytosine specific restriction endonuclease McrA & |
| | | | COG1403” |
| | | Annotated | 10000..11496 |
| | | | /product=“−> IscB(18,374)[119.9] \| |
| | | | pfam14279(95,151)[32.1]\| COG1403(80,157)[36.2] |
| | | | :A(7,281632,72404,0)$zz$5-methylcytosine specific restriction endonuclease McrA & |
| | | | COG1403” |
| | | Annotated | 10024..11493 |
| | | | /product=“−> IscB(10,366)[120.1] \| |
| | | | pfam14279(95,151)[32.1]\| COG1403(80,157)[36.2] : |
| | | | orf(7,281632,72404,0)$zz$PartialORF @ 25-1495” |
| | | Questional_CDS | complement(10135..10335) |
| | | | /product=“orf(7,281632,72404,1)$zz$ORF @ 136-337” |
| | | Questional_CDS | complement(10338..10556) |
| | | | /product=“orf(7,281632,72404,2)$zz$ORF @ 339-558” |
| | | Questional_CDS | /product=“orf(7,281632,72404,3)$zz$ORF @ |
| | | | 1179-1371” |
| | | DR | 11723..11751 |
| | | DR | 11789..11817 |
| | | DR | 11854..11882 |
| | | DR | 11921..11949 |
| | | DR | 11989..12017 |
| | | DR | 12056..12084 |
| | | Annotated | 12973..13314 |
| | | | /product=“−> pfam04430(3,110)[90.1] \| |
| | | | COG1504(1,113)[110.9] : |
| | | | A(7,281632,72404,1)$zz$hypothetical protein” |
| | | Questional_CDS | complement(13044..13217) |
| | | | /product=“orf(7,281632,72404,5)$zz$ORF @ |
| | | | 3045-3219” |
| | | Annotated | complement(13255..13614) |
| | | | /product=“−> pfam04493(18,112)[66.1] \| |
| | | | COG1515(5,102)[73.6] : |
| | | | A(7,281632,72404,2)$zz$deoxyribonuclease V & KO:K05982” |
| | | Annotated | 13796..14077 |
| | | | /product=“−> pfam01817(8,85)[84.8] \| COG1605(1,93)[82.7] |
| | | | :A(7,281632,72404,3)$zz$chorismate |
| | | | mutase/prephenatedehydratase & KO:K14170” |
| 86 | a0315541_1000067_organized | Questional_CDS | complement(415..636) |
| | (Definition | | /product=“orf(4,280937,66,103)$zz$ORF @ |
| | Ga0315541_1000067) | | 29595-29817” /label=“orf(4,280937,66,103)$zz$ORF @ 29595-29817 CDS” |
| | | CDS | 581..2095 |
| | | | /product=“orf(4,280937,66,99)$zz$ORF @ |
| | | | 28136-29651” |
| | | | /label=“orf(4,280937,66,99)$zz$ORF @ 28136-29651 CDS” |
| | | CDS | complement(633..2156) |
| | | | /product=“orf(4,280937,66,98)$zz$ORF @ |
| | | | 28075-29599” |
| | | | /label=“orf(4,280937,66,98)$zz$ORF @ 28075-29599 |
| | | | CDS” |
| | | Questional_CDS | 726..1109 |
| | | | /product=“orf(4,280937,66,102)$zz$ORF @ |
| | | | 29122-29506” |
| | | | /label=“orf(4,280937,66,102)$zz$ORF @ 29122-29506 CDS” |
| | | Questional_CDS | 1299..1490 |
| | | | /product=“orf(4,280937,66,101)$zz$ORF @ |
| | | | 28741-28933” |
| | | | /label=“orf(4,280937,66,101)$zz$ORF @ 28741-28933 CDS” |
| | | Annotated | complement(2089..3216) |
| | | | /product=“−> pfam01882(48,133)[73.1] \| |
| | | | pfam13519(91,196)[27.5] \| COG1721(13,299) |
| | | | [126.3] : |
| | | | orf(4,280937,66,94)$zz$ORF @ 27015-28143” |
| | | | /label=“−> pfam01882(48,133)[73.1] \| |
| | | | pfam13519(91,196)[27.5] \| COG1721(13,299) |
| | | | [126.3] : |
| | | | orf(4,280937,66,94)$zz$ORF @ 27015-28143 CDS” |
| | | Questional_CDS | 2248..3003 |
| | | | /product=“orf(4,280937,66,96)$zz$ORF @ |
| | | | 27228-27984” /label=“orf(4,280937,66,96)$zz$ORF @ 27228-27984 CDS” |
| | | Questional_CDS | 2339..2656 |
| | | | /product=“orf(4,280937,66,97)$zz$ORF @ |
| | | | 27575-27893” |
| | | | /label=“orf(4,280937,66,97)$zz$ORF @ 27575-27893 CDS” |
| | | Questional_CDS | complement(2676..3017) |
| | | | /product=“orf(4,280937,66,95)$zz$ORF @ |
| | | | 27214-27556” |
| | | | /label=“orf(4,280937,66,95)$zz$ORF @ 27214-27556 CDS” |
| | | Annotated | complement(3050..4090) |
| | | | /product=“−> pfam07726(58,192)[207.6] \| |
| | | | COG0714(14,343)[279.1] : |
| | | | A(4,280937,66,17)$zz$MoxR-like |
| | | | ATPase & KO:K03924” |
| | | | /label=“−> pfam07726(58,192)[207.6] \| |
| | | | COG0714(14,343)[279.1] : |
| | | | A(4,280937,66,17)$zz$MoxR-like |
| | | | ATPase & KO:K03924 CDS” |
| | | Questional_CDS | 3651..4085 |
| | | | /product=“orf(4,280937,66,93)$zz$ORF @ |
| | | | 26146-26581” |
| | | | /label=“orf(4,280937,66,93)$zz$ORF @ 26146-26581 CDS” |
| | | CDS | 4107..5306 |
| | | | /product=“orf(4,280937,66,88)$zz$ORF @ |
| | | | 24925-26125” |
| | | | /label=“orf(4,280937,66,88)$zz$ORF @ 24925-26125 CDS” |
| | | Annotated | complement(4134..5135) |
| | | | /product=“−> pfam07726(45,179)[205.0] \| |
| | | | COG0714(7,330)[290.3] : |
| | | | A(4,280937,66,16)$zz$MoxR-like |
| | | | ATPase & KO:K03924” |
| | | | /label=“−> pfam07726(45,179)[205.0] \| |
| | | | COG0714(7,330)[290.3] : |
| | | | A(4,280937,66,16)$zz$MoxR-like |
| | | | ATPase & KO:K03924 CDS” |
| | | Questional_CDS | 4159..4482 |
| | | | /product=“orf(4,280937,66,91)$zz$ORF @ |
| | | | 25749-26073” |
| | | | /label=“orf(4,280937,66,91)$zz$ORF @, 25749-26073 CDS” |
| | | Questional_CDS | 4735..5052 |
| | | | /product=“orf(4,280937,66,90)$zz$ORF @ |
| | | | 25179-25497” |
| | | | /label=“orf(4,280937,66,90)$zz$ORF @ 25179-25497 CDS” |
| | | Questional_CDS | complement(5149..6018) |
| | | | /product=“orf(4,280937,66,85)$zz$ORF @ 24213-25083” |
| | | | /label=“orf(4,280937,66,85)$zz$ORF @ 24213-25083 CDS” |
| | | Questional_CDS | complement(5274..5924) |
| | | | /product=“orf(4,280937,66,87)$zz$ORF @ |
| | | | 24307-24958” |
| | | | /label=“orf(4,280937,66,87)$zz$ORF @ 24307-24958 CDS” |
| | | Annotated | 5536..5955 |
| | | | /product=“−> pfam00072(5,116)[30.1] \| |
| | | | COG2197(3,131)[32.9]: A(4,280937,66,15)$zz$DNAbinding |
| | | | NarL/FixJ familyresponse regulator & COG2197” /label=“−> pfam00072(5,116)[30.1] \| |
| | | | COG2197(3,131)[32.9]: |
| | | | A(4,280937,66,15)$zz$DNA-binding NarL/FixJ |
| | | | Family response regulator & COG2197 CDS” |
| | | Questional_CDS | complement(5972..6187) |
| | | | /product=“orf(4,280937,66,84)$zz$ORF @ |
| | | | 24044-24260” |
| | | | /label=“orf(4,280937,66,84)$zz$ORF @ 24044-24260 CDS” |
| | | Questional_CDS | 5994..6191 |
| | | | /product=“orf(4,280937,66,83)$zz$ORF @ |
| | | | 24040-24238” |
| | | | /label=“orf(4,280937,66,83)$zz$ORF @ 24040-24238 CDS” |
| | | Annotated | complement(6042..7844) |
| | | | /product=“−> pfam00884(5,374)[177.8] \| |
| | | | COG3119(1,479)[215.2] : |
| | | | orf(4,280937,66,80)$zz$ORF @ |
| | | | 22387-24190” |
| | | | /label=“−> pfam00884(5,374)[177.8] \| |
| | | | COG3119(1,479)[215.2] |
| | | | : orf(4,280937,66,80)$zz$ORF @ 22387-24190 CDS” |
| | | Questional_CDS | complement(6184..7329) |
| | | | /product=“orf(4,280937,66,81)$zz$ORF @ |
| | | | 22902-24048” |
| | | | /label=“orf(4,280937,66,81)$zz$ORF @ 22902-24048 CDS” |
| | | CDS | 6330..7874 |
| | | | /product=“orf(4,280937,66,79)$zz$ORF @ |
| | | | 22357-23902” |
| | | | /label=“orf(4,280937,66,79)$zz$ORF @ 22357-23902 CDS” |
| | | Questional_CDS | 6337..6639 |
| | | | /product=“orf(4,280937,66,82)$zz$ORF @ |
| | | | 23592-23895” |
| | | | /label=“orf(4,280937,66,82)$zz$ORF @ 23592-23895 CDS” |
| | | CDS | complement(7336..8874) |
| | | | /product=“orf(4,280937,66,76)$zz$ORF @ |
| | | | 21357-22896” |
| | | | /label=“orf(4,280937,66,76)$zz$ORF @ 21357-22896 CDS” |
| | | Annotated | 7477..8838 |
| | | | /product=“−> pfam01408(4,120)[62.0] \| |
| | | | COG0673(1,363)[129.8] : |
| | | | orf(4,280937,66,77)$zz$ORF @ |
| | | | 21393-22755” |
| | | | /label=“−> pfam01408(4,120)[62.0] \| |
| | | | COG0673(1,363)[129.8] |
| | | | : orf(4,280937,66,77)$zz$ORF @ 21393-22755 CDS” |
| | | Questional_CDS | 7871..8062 |
| | | | /product=“orf(4,280937,66,78)$zz$ORF @ |
| | | | 22169-22361” |
| | | | /label=“orf(4,280937,66,78)$zz$ORF @ 22169-22361 CDS” |
| | | Questional_CDS | 7962..8909 |
| | | | /product=“orf(4,280937,66,75)$zz$ORF @ |
| | | | 21322-22270” |
| | | | /label=“orf(4,280937,66,75)$zz$ORF @ 21322-22270 CDS” |
| | | Questional_CD | complement(8483..8914) |
| | | | /product=“orf(4,280937,66,74)$zz$ORF @ |
| | | | 21317-21749” |
| | | | /label=“orf(4,280937,66,74)$zz$ORF @ 21317-21749 CDS” |
| | | Questional_CD | complement(8835..9263) |
| | | | /product=“orf(4,280937,66,71)$zz$ORF @ |
| | | | 20968-21397” |
| | | | /label=“orf(4,280937,66,71)$zz$ORF @, 20968-21397 CDS” |
| | | Questional_CD | 8873..9226 |
| | | | /product=“orf(4,280937,66,72)$zz$ORF @ |
| | | | 21005-21359” |
| | | | /label=“orf(4,280937,66,72)$zz$ORF @ 21005-21359 CDS” |
| | | Questional_CD | complement(8899..9138) |
| | | | /product=“orf(4,280937,66,73)$zz$ORF @ |
| | | | 21093-21333” |
| | | | /label=“orf(4,280937,66,73)$zz$ORF @ 21093-21333 CDS” |
| | | Questional_CD | complement(9107..9460) |
| | | | /product=“orf(4,280937,66,70)$zz$ORF @ |
| | | | 20771-21125” |
| | | | /label=“orf(4,280937,66,70)$zz$ORF @ 20771-21125 CDS” |
| | | CDS | 9243..10466 /product=“orf(4,280937,66,66)$zz$ORF @ |
| | | | 19765-20989” |
| | | | /label=“orf(4,280937,66,66)$zz$ORF @ 19765-20989 CDS” |
| | | Questional_CDS | complement(9711..9959) |
| | | | /product=“orf(4,280937,66,69)$zz$ORF @ |
| | | | 20272-20521” |
| | | | /label=“orf(4,280937,66,69)$zz$ORF @ 20272-20521 CDS” |
| | | Questional_CDS | complement(9776..10081) |
| | | | /product=“orf(4,280937,66,67)$zz$ORF @ |
| | | | 20150-20456” |
| | | | /label=“orf(4,280937,66,67)$zz$ORF @ 20150-20456 CDS” |
| | | Questional_CDS | Questional_CDS 9782..9976 |
| | | | /product=“orf(4,280937,66,68)$zz$ORF @ |
| | | | 20255-20450” |
| | | | /label=“orf(4,280937,66,68)$zz$ORF @ 20255-20450 CDS” |
| | | POI | 10000..11919 |
| | | | /product=“−> IscB(3,424)[178.9] \| |
| | | | pfam14279(283,338)[46.4]\| pfam14239(1,76)[38.0] \| |
| | | | pfam14239(135,263)[31.3] \|COG1403(228,339)[43.6] |
| | | | :A(4,280937,66,12)$zz$5-methylcytosine-specific |
| | | | restrictionendonuclease McrA & COG1403” |
| | | | /label=“−> IscB(3,424)[178.9] \| |
| | | | pfam14279(283,338)[46.4]\| |
| | | | pfam14239(1,76)[38.0] \| pfam14239(135,263)[31.3] |
| | | | \|COG1403(228,339)[43.6] |
| | | | :A(4,280937,66,12)$zz$5-methylcytosine-specific restriction endonuclease McrA & |
| | | | COG1403 POI” |
| | | Annotated | 10000..11919 |
| | | | /product=“−> IscB(3,424)[178.9] \| |
| | | | pfam14279(283,338)[46.4]\| pfam14239(1,76)[38.0] \| |
| | | | pfam14239(135,263)[31.3] \|COG1403(228,339)[43.6] |
| | | | :A(4,280937,66,12)$zz$5-methylcytosine-specific restrictionendonuclease McrA & |
| | | | COG1403” |
| | | | /label=“−> IscB(3,424)[178.9] \| |
| | | | pfam14279(283,338)[46.4]\| |
| | | | pfam14239(1,76)[38.0] \| pfam14239(135,263)[31.3] |
| | | | \|COG1403(228,339)[43.6] |
| | | | :A(4,280937,66,12)$zz$5-methylcytosine-specificrestrictionendonuclease McrA & |
| | | | COG1403 CDS” |
| | | Questional_CDS | complement(10267..10593) |
| | | | /product=“orf(4,280937,66,65)$zz$ORF @ |
| | | | 19638-19965” |
| | | | /label=“orf(4,280937,66,65)$zz$ORF @ 19638-19965 CDS” |
| | | Questional_CDS | 10427..10648 |
| | | | /product=“orf(4,280937,66,64)$zz$ORF @ |
| | | | 19583-19805” |
| | | | /label=“orf(4,280937,66,64)$zz$ORF @ 19583-19805 CDS” |
| | | Questional_CDS | complement(11053..11247) |
| | | | /product=“orf(4,280937,66,63)$zz$ORF @ |
| | | | 18984-19179” |
| | | | /label=“orf(4,280937,66,63)$zz$ORF @ 18984-19179 CDS” |
| | | Questional_CDS | complement(11281..11691) |
| | | | /product=“orf(4,280937,66,62)$zz$ORF @ |
| | | | 18540-18951” |
| | | | /label=“orf(4,280937,66,62)$zz$ORF @ 18540-18951 CDS” |
| | | Questional_CDS | complement(11783..12019) |
| | | | /product=“orf(4,280937,66,60)$zz$ORF @ |
| | | | 18212-18449” |
| | | | /label=“orf(4,280937,66,60)$zz$ORF @ 18212-18449 CDS” |
| | | Questional_CDS | complement(11824..12063) |
| | | | /product=“orf(4,280937,66,59)$zz$ORF @ |
| | | | 18168-18408” |
| | | | /label=“orf(4,280937,66,59)$zz$ORF @ 18168-18408 CDS” |
| | | DR | 11944..11967 /label=“DR” |
| | | DR | 12005..12028 /label=“DR” |
| | | DR | 12066..12089 /label=“DR” |
| | | DR | 12129..12152 /label=“DR” |
| | | DR | 12189..12212 /label=“DR” |
| | | DR | 12250..12273 /label=“DR” |
| | | Questional_CDS | 12268..12687 |
| | | | /product=“orf(4,280937,66,58)$zz$ORF @ |
| | | | 17544-17964” |
| | | | /label=“orf(4,280937,66,58)$zz$ORF @ 17544-17964 |
| | | | CDS” |
| | | Questional_CDS | complement(12297..12764) |
| | | | /product=“orf(4,280937,66,57)$zz$ORF @ |
| | | | 17467-17935” |
| | | | /label=“orf(4,280937,66,57)$zz$ORF @ 17467-17935 CDS” |
| | | Questional_CDS | complement(12460..13068) |
| | | | /product=“orf(4,280937,66,56)$zz$ORF @ |
| | | | 17163-17772” |
| | | | /label=“orf(4,280937,66,56)$zz$ORF @ 17163-17772 CDS” |
| | | CDS | 12709..14451 |
| | | | /product=“orf(4,280937,66,53)$zz$ORF @ |
| | | | 15780-17523” |
| | | | /label=“orf(4,280937,66,53)$zz$ORF @ 15780-17523 |
| | | | CDS” |
| | | CDS | complement(12776..15607) |
| | | | /product=“orf(4,280937,66,49)$zz$ORF @ |
| | | | 14624-17456” |
| | | | /label=“orf(4,280937,66,49)$zz$ORF @ 14624-17456 |
| | | | CDS” |
| | | Annotated | 12788..14398 |
| | | | /product=“−> pfam00149(269,459)[47.7] : |
| | | | A(4,280937,66,11)$zz$calcineurin-like |
| | | | phosphoesterase |
| | | | family protein & pfam00149” |
| | | | /label=“−> pfam00149(269,459)[47.7] : |
| | | | A(4,280937,66,11)$zz$calcineurin-like |
| | | | phosphoesterase |
| | | | family protein & pfam00149 CDS” |
| | | Questional_CDS | complement(13141..13479) |
| | | | /product=“orf(4,280937,66,55)$zz$ORF @ |
| | | | 16752-17091” |
| | | | /label=“orf(4,280937,66,55)$zz$ORF @ 16752-17091 CDS” |
| | | Questional_CDS | complement(14293..14688) |
| | | | /product=“orf(4,280937,66,51)$zz$ORF @ |
| | | | 15543-15939” |
| | | | /label=“orf(4,280937,66,51)$zz$ORF @ 15543-15939 CDS” |
| | | Questional_CDS | complement(14370..14672) |
| | | | /product=“orf(4,280937,66,52)$zz$ORF @ |
| | | | 15559-15862” |
| | | | /label=“orf(4,280937,66,52)$zz$ORF @ 15559-15862 CDS” |
| | | Annotated | 14687..16282 |
| | | | /product=“−> pfam00939(76,529)[146.5] \| |
| | | | COG0471(18,528)[162.0] : |
| | | | A(4,280937,66,10)$zz$sodium-dependent |
| | | | Dicarboxylate transporter 2/3/5 & KO:K14445” |
| | | | /label=“−> pfam00939(76,529)[146.5] \| |
| | | | COG0471(18,528)[162.0] : |
| | | | A(4,280937,66,10)$zz$sodium-dependent |
| | | | Dicarboxylate transporter 2/3/5 & KO:K14445 CDS” |
| | | Questional_CDS | complement(14755..15318) |
| | | | /product=“orf(4,280937,66,50)$zz$ORF @ |
| | | | 14913-15477” |
| | | | /label=“orf(4,280937,66,50)$zz$ORF @ 14913-15477 |
| | | | CDS” |
| | | Questional_CDS | /product=“orf(4,280937,66,48)$zz$ORF @ |
| | | | 14451-14724” |
| | | | /label=“orf(4,280937,66,48)$zz$ORF @ 14451-14724 |
| | | | CDS” |
| | | Questional_CDS | complement(15683..16366) |
| | | | /product=“orf(4,280937,66,45)$zz$ORF @ |
| | | | 13865-14549” |
| | | | /label=“orf(4,280937,66,45)$zz$ORF @ 13865-14549 |
| | | | CDS” |
| | | Questional_CDS | complement(15781..16122) |
| | | | /product=“orf(4,280937,66,47)$zz$ORF @ |
| | | | 14109-14451” |
| | | | /label=“orf(4,280937,66,47)$zz$ORF @ 14109-14451 |
| | | | CDS” |
| | | Questional_CDS | complement(16185..16931) |
| | | | /product=“orf(4,280937,66,43)$zz$ORF @ |
| | | | 13300-14047” |
| | | | /label=“orf(4,280937,66,43)$zz$ORF @ 13300-14047 CDS” |
| | | CDS | 16365..16730 |
| | | | /product=“A(4,280937,66,9)$zz$hypothetical |
| | | | protein” |
| | | | /label=“A(4,280937,66,9)$zz$hypothetical protein CDS” |
| | | Questional_CDS | 16604..17050 |
| | | | /product=“orf(4,280937,66,42)$zz$ORF @ |
| | | | 13181-13628” |
| | | | /label=“orf(4,280937,66,42)$zz$ORF @ 13181-13628 CDS” |
| | | Questional_CDS | complement(16826..17143) |
| | | | /product=“orf(4,280937,66,41)$zz$ORF @ |
| | | | 13088-13406” |
| | | | /label=“orf(4,280937,66,41)$zz$ORF @ 13088-13406 CDS” |
| | | CDS | complement(17136..18977) |
| | | | /product=“orf(4,280937,66,37)$zz$ORF @ |
| | | | 11254-13096” |
| | | | /label=“orf(4,280937,66,37)$zz$ORF @ 11254-13096 CDS” |
| | | Annotated | 17310..18764 |
| | | | /product=“−> pfam00171(5,476)[443.4] \| |
| | | | COG1012(1,483)[454.5] : |
| | | | A(4,280937,66,8)$zz$malonate-semialdehyde |
| | | | dehydrogenase |
| | | | (acetylating)/methylmalonate-semialdehyde |
| | | | dehydrogenase & |
| | | | KO:K00140” |
| | | | /label=“−> pfam00171(5,476)[443.4] \| |
| | | | COG1012(1,483)[454.5] |
| | | | : A(4,280937,66,8)$zz$malonate-semialdehyde |
| | | | dehydrogenase |
| | | | (acetylating)/methylmalonate-semialdehyde |
| | | | dehydrogenase & |
| | | | KO:K00140 CDS” |
| | | Questional_CDS | complement(17495..18148) |
| | | | /product=“orf(4,280937,66,40)$zz$ORF @ |
| | | | 12083-12737” |
| | | | /label=“orf(4,280937,66,40)$zz$ORF @ 12083-12737 CDS” |
| | | Questional_CDS | 17825..18862 |
| | | | /product=“orf(4,280937,66,38)$zz$ORF @ |
| | | | 11369-12407” |
| | | | /label=“orf(4,280937,66,38)$zz$ORF @ 11369-12407 CDS” |
| | | Questional_CDS | complement(18736..19164) |
| | | | /product=“orf(4,280937,66,36)$zz$ORF @ |
| | | | 11067-11496” |
| | | | /label=“orf(4,280937,66,36)$zz$ORF @ 11067-11496 CDS” |
| | | CDS | complement(19007..20755) |
| | | | /product=“orf(4,280937,66,31)$zz$ORF @ |
| | | | 9476-11225” |
| | | | /label=“orf(4,280937,66,31)$zz$ORF @ 9476-11225 |
| | | | CDS” |
| | | Annotated | 19013..20122 |
| | | | /product=“−> pfam02317(185,336)[103.9] : |
| | | | A(4,280937,66,7)$zz$opine dehydrogenase & |
| | | | KO:K04940” |
| | | | /label=“−> pfam02317(185,336)[103.9] : |
| | | | A(4,280937,66,7)$zz$opine dehydrogenase & |
| | | | KO:K04940 CDS” |
| | | | Questional_CDS 19168..19839 |
| | | | /product=“orf(4,280937,66,34)$zz$ORF @ |
| | | | 10392-11064” |
| | | | /label=“orf(4,280937,66,34)$zz$ORF @ 10392-11064 CDS” |
| | | Questional_CDS | complement(19348..19626) |
| | | | /product=“orf(4,280937,66,35)$zz$ORF @ |
| | | | 10605-10884” |
| | | | /label=“orf(4,280937,66,35)$zz$ORF @, 10605-10884 CDS” |
| | | Questional_CDS | complement(20098..20427) |
| | | | /product=“orf(4,280937,66,32)$zz$ORF @ |
| | | | 9804-10134” |
| | | | /label=“orf(4,280937,66,32)$zz$ORF @ 9804-10134 CDS” |
| | | Questional_CDS | complement(20795..20971) |
| | | | /product=“orf(4,280937,66,30)$zz$ORF @ 9260-9437” |
| | | | /label=“orf(4,280937,66,30)$zz$ORF @ 9260-9437 CDS” |
| | | Questional_CDS | complement(20998..21327) |
| | | | /product=“orf(4,280937,66,29)$zz$ORF @ 8904-9234” |
| | | | /label=“orf(4,280937,66,29)$zz$ORF @ 8904-9234 CDS |
| 87 | 0315285_10000442_organized | Padding | <1..2945 |
| | (Accession | | /label |
| | 0315285_10000442) | | |
| | | CDS | 2948..3055 |
| | | | /product=“A(7,281636,441,0)$zz$hypothetical protein” |
| | | CDS | 3140..3283 |
| | | | /product=“A(7,281636,441,1)$zz$hypothetical |
| | | | protein” |
| | | Annotated | 3314..3736 |
| | | | /product=“−> pfam08241(3,76)[39.7] \| |
| | | | COG2227(2,111)[28.3] : |
| | | | A(7,281636,441,2)$zz$2-polyprenyl-3-methyl-5- |
| | | | hydroxy-6-meto xy-1,4-benz oquinol methylase & COG2227” |
| | | Questional_CDS | complement(3440..3625) |
| | | | /product=“orf(7,281636,441,0)$zz$ORF @ 494-680” |
| | | Questional_CDS | complement(3622..3837) |
| | | | /product=“orf(7,281636,441,1)$zz$ORF @ 676-892” |
| | | Questional_CDS | complement(3641..4003) |
| | | | /product=“orf(7,281636,441,2)$zz$ORF @ 695-1058” |
| | | Questional_CDS | 3726..4076 |
| | | | /product=“orf(7,281636,441,3)$zz$ORF @ 780-1131” |
| | | Questional_CDS | 3811..4740 |
| | | | /product=“orf(7,281636,441,4)$zz$ORF @ 865-1795” |
| | | CDS | complement(3937..5196) |
| | | | /product=“A(7,281636,441,3)$zz$hypothetical |
| | | | protein” |
| | | Questional_CDS | 4004..4213 |
| | | | /product=“orf(7,281636,441,6)$zz$ORF @ 1058-1268” |
| | | Questional_CDS | 5244..5966 |
| | | | /product=“orf(7,281636,441,7)$zz$ORF @ 2298-3021” |
| | | CDS | complement(5472..6722) |
| | | | /product=“A(7,281636,441,4)$zz$hypothetical |
| | | | protein” |
| | | Questional_CDS | 5566..5790 |
| | | | /product=“orf(7,281636,441,9)$zz$ORF @ 2620-2845” |
| | | Questional_CDS | complement(5612..5806) |
| | | | /product=“orf(7,281636,441,10)$zz$ORF @ 2666-2861” |
| | | Questional_CDS | complement(5998..6255) |
| | | | /product=“orf(7,281636,441,11)$zz$ORF @ 3052-3310” |
| | | Questional_CDS | 6064..6294 |
| | | | /product=“orf(7,281636,441,12)$zz$ORF @ 3118-3349” |
| | | Questional_CDS | 6099..6983 |
| | | | /product=“orf(7,281636,441,13)$zz$ORF @ 3153-4038” |
| | | Questional_CDS | 6445..6759 |
| | | | /product=“orf(7,281636,441,14)$zz$ORF @ 3499-3814” |
| | | Questional_CDS | 6775..7230 |
| | | | /product=“orf(7,281636,441,15)$zz$ORF @ 3829-4285” |
| | | Questional_CDS | 6875..7117 |
| | | | /product=“orf(7,281636,441,16)$zz$ORF @ 3929-4172” |
| | | Questional_CDS | complement(7013..8161) |
| | | | /product=“orf(7,281636,441,17)$zz$ORF @ 4067-5216” |
| | | Annotated | complement(7099..9636) |
| | | | /product=“−> pfam00176(205,524)[129.8] \| |
| | | | pfam00271(533,645)[63.9] \| COG0553(200,690) |
| | | | [300.4] : A(7,281636,441,6)$zz$SNF2 family DNA or RNA helicase & COG0553” |
| | | Questional_CDS | 8074 /product=“orf(7,281636,441,19)$zz$ORF @, 4286-5129” |
| | | CDS | 7426..9906 /product=“orf(7,281636,441,20)$zz$ORF @ |
| | | | 4480-6961” |
| | | Questional_CDS | complement(8760..9248) /product=“orf(7,281636,441,21)$zz$ORF @ |
| | | | 5814-6303” |
| | | Questional_CDS | 9437..9658 /product=“orf(7,281636,441,22)$zz$ORF @ |
| | | | 6491-6713” |
| | | Questional_CDS | complement(9518..9697) /product=“orf(7,281636,441,23)$zz$ORF @ |
| | | | 6572-6752” |
| | | Questional_CDS | complement(9655..9915) /product=“orf(7,281636,441,24)$zz$ORF @ |
| | | | 6709-6970” |
| | | Questional_CDS | 10021 /product=“orf(7,281636,441,25)$zz$ORF @ |
| | | | 6713-7076” |
| | | Questional_CDS | 9720..9965 /product=“orf(7,281636,441,26)$zz$ORF @ |
| | | | 6774-7020” |
| | | POI | 10000..11919 |
| | | | /product=“−> IscB(3,65)[48.9] \| IscB(204,425) |
| | | | [131.0] \|pfam14279(283,338)[44.6] \| pfam14239(134,263) |
| | | | [36.5] \| pfam14239(1,81)[35.4] \| COG1403(241,343)[47.1]: |
| | | | A(7,281636,441,7)$zz$5-methylcytosine-specific restriction endonuclease McrA & |
| | | | COG1403” |
| | | Annotated | 10000..11919 |
| | | | /product=“−> IscB(3,65)[48.9] \| IscB(204,425) |
| | | | [131.0] \| |
| | | | pfam14279(283,338)[44.6] \| pfam14239(134,263) |
| | | | [36.5] \| |
| | | | pfam14239(1,81)[35.4] \|COG1403(241,343)[47.1] : |
| | | | A(7,281636,441,7)$zz$5-methylcytosine-specific restriction endonuclease McrA & |
| | | | COG1403” |
| | | Questional_CDS | complement(10078..10698) |
| | | | /product=“orf(7,281636,441,28)$zz$ORF @ |
| | | | 7132-7753” |
| | | Questional_CDS | complement(10506..10709) |
| | | | /product=“orf(7,281636,441,29)$zz$ORF @ |
| | | | 7560-7764” |
| | | Questional_CDS | complement 10771..11394) |
| | | | /product=“orf(7,281636,441,30)$zz$ORF @ |
| | | | 7825-8449” |
| | | Questional_CDS | complement(10851..11126) |
| | | | /product=“orf(7,281636,441,31)$zz$ORF @ |
| | | | 7905-8181” |
| | | Questional_CDS | 11935..12231) |
| | | | /product=“orf(7,281636,441,32)$zz$ORF @ |
| | | | 8989-9286” |
| | | DR | 11941..11969 |
| | | DR | 12002..12030 |
| | | DR | 12062..12090 |
| | | DR | 12123..12151 |
| | | Questional_CDS | complement(12180..12413) |
| | | | /product=“orf(7,281636,441,33)$zz$ORF @ |
| | | | 9234-9468” |
| | | | 12184..12212 |
| | | | 12245..12273 |
| | | | 12306..12334 |
| | | | 12368..12396 |
| | | | 12430..12458 |
| | | Questional_CDS | 12452..12832 |
| | | | /product=“orf(7,281636,441,34)$zz$ORF @ |
| | | | 9506-9887” |
| | | DR | 12490..12518 |
| | | Questional_CDS | complement(12606..12896) |
| | | | /product=“orf(7,281636,441,35)$zz$ORF @ |
| | | | 9660-9951” |
| | | Questional_CDS | 12727..12909 |
| | | | /product=“orf(7,281636,441,36)$zz$ORF @ |
| | | | 9781-9964” |
| | | CDS | 13167..13823 |
| | | | /product=“A(7,281636,441,8)$zz$hypothetical |
| | | | protein” |
| | | Questional_CDS | complement(13229..13435) |
| | | | /product=“orf(7,281636,441,38)$zz$ORF @ |
| | | | 10283-10490” |
| | | Questional_CDS | complement(13408..13689) |
| | | | /product=“orf(7,281636,441,39)$zz$ORF @ |
| | | | 10462-10744” |
| | | CDS | complement(13902..14051) |
| | | | /product=“A(7,281636,441,9)$zz$hypothetical |
| | | | protein” |
| | | Annotated | complement(14055..14585) |
| | | | /product=“−> pfam00011(104,176)[21.4] |
| | | | COG0071(63,176)[57.0] : |
| | | | A(7,281636,441,10)$zz$HSP20 family |
| | | | protein & KO:K13993” |
| | | Questional_CDS | 14254..14727 |
| | | | /product=“orf(7,281636,441,41)$zz$ORF @ |
| | | | 11308-11782” |
| | | Questional_CDS | 14325..14624 |
| | | | /product=“orf(7,281636,441,42)$zz$ORF @ |
| | | | 11379-11679” |
| | | Questional_CDS | complement(14471..14641) |
| | | | /product=“orf(7,281636,441,43)$zz$ORF @ |
| | | | 11525-11696” |
| | | Annotated | complement(14681..17068) |
| | | | /product=“−> pfam00012(4,598)[633.7] \| |
| | | | COG0443(1,601)[620.3] : |
| | | | orf(7,281636,441,44)$zz$ORF @ |
| | | | 11735-14123” |
| | | Questional_CDS | complement(14923..15267) |
| | | | /product=“orf(7,281636,441,45)$zz$ORF @ |
| | | | 11977-12322” |
| | | Questional_CDS | 15420..15689 |
| | | | /product=“orf(7,281636,441,46)$zz$ORF @ |
| | | | 12474-12744” |
| | | Questional_CDS | complement(15655..15852) |
| | | | /product=“orf(7,281636,441,47)$zz$ORF @ |
| | | | 12709-12907” |
| | | Questional_CDS | 15794..16537 |
| | | | /product=“orf(7,281636,441,48)$zz$ORF @ |
| | | | 12848-13592” |
| | | Questional_CDS | complement(16216..16383) |
| | | | /product=“orf(7,281636,441,49)$zz$ORF @ |
| | | | 13270-13438” |
| | | Questional_CDS | 16248..16826 |
| | | | /product=“orf(7,281636,441,50)$zz$ORF @ |
| | | | 13302-13881” |
| | | Questional_CDS | complement(16494..16667) |
| | | | /product=“orf(7,281636,441,51)$zz$ORF @ |
| | | | 13548-13722” |
| | | Questional_CDS | 16556..17002 |
| | | | /product=“orf(7,281636,441,52)$zz$ORF @ |
| | | | 13610-14057” |
| | | Annotated | complement(16621..16923) |
| | | | /product=“−> pfam00741(13,51)[46.5] : |
| | | | A(7,281636,441,12)$zz$gas vesicle protein GvpA/ GvpJ/GvpM family & pfam00741” |
| | | CDS | 16950..18155 |
| | | | /product=“orf(7,281636,441,54)$zz$ORF @ |
| | | | 14004-15210” |
| | | Annotated | complement(16962..17771) |
| | | | /product=“−> pfam06386(18,268)[220.6] : |
| | | | A(7,281636,441,13)$zz$gas vesicle protein GvpL/ GvpF & pfam06386” |
| | | Questional_CDS | complement(17090..17764) |
| | | | /product=“orf(7,281636,441,56)$zz$ORF @ |
| | | | 14144-14819” |
| | | Questional_CDS | 17717..18346 |
| | | | /product=“orf(7,281636,441,57)$zz$ORF @ |
| | | | 14771-15401” |
| | | Annotated | complement(17768..18112) |
| | | | /product=“−> pfam05121(1,88)[65.9] : |
| | | | A(7,281636,441,14)$zz$gas vesicle protein GvpK & pfam05121” |
| | | Annotated | complement(18109..18837) |
| | | | /product=“−> COG0071(139,242)[42.4] : |
| | | | A(7,281636,441,15)$zz$HSP20 family molecular chaperone IbpA & COG0071” |
| | | Questional_CDS | 18133..18924 |
| | | | /product=“orf(7,281636,441,60)$zz$ORF @ |
| | | | 15187-15979” |
| | | Questional_CDS | 18645..19664 |
| | | | /product=“orf(7,281636,441,61)$zz$ORF @ |
| | | | 15699-16719” |
| | | Questional_CDS | 18725..19336 |
| | | | /product=“orf(7,281636,441,62)$zz$ORF @ |
| | | | 15779-16391” |
| | | Questional_CDS | complement(18783..18998) |
| | | | /product=“orf(7,281636,441,63)$zz$ORF @ |
| | | | 15837-16053 |
| | | Questional_CDS | complement(18844..19011) |
| | | | /product=“orf(7,281636,441,64)$zz$ORF @ |
| | | | 15898-16066” |
| | | Annotated | complement(18899..19264) |
| | | | /product=“−> pfam00741(16,54)[61.5] : |
| | | | A(7,281636,441,16)$zz$gas vesicle protein GvpA/ GvpJ/GvpM family & pfam00741” |
| | | Annotated | complement(19266..19550) |
| | | | /product=“−> pfam05800(2,84)[73.8] : |
| | | | A(7,281636,441,17)$zz$gas vesicle protein GvpO & pfam05800” |
| | | Questional_CDS | 19538..19708 /product=“orf(7,281636,441,67)$zz$ORF @ |
| | | | 16592-16763” |
| | | Questional_CDS | 19549..20619 |
| | | | /product=“orf(7,281636,441,68)$zz$ORF @ |
| | | | 16603-17674” |
| | | Annotated | complement(19585..20088) |
| | | | /product=“−> pfam05120(5,83)[51.2] : |
| | | | orf(7,281636,441,69)$zz$ORF @ 16639-17143” |
| | | Questional_CDS | 19833..20696 |
| | | | /product=“orf(7,281636,441,70)$zz$ORF @ |
| | | | 16887-17751” |
| | | Annotated | complement(19842..20711) |
| | | | /product=“−> pfam06386(28,282)[174.9] : |
| | | | A(7,281636,441,19)$zz$gas vesicle protein GvpL/ GvpF & pfam06386” |
| | | Annotated | complement(20728..21837) |
| | | | /product=“−> pfam06386(5,249)[178.9] \| |
| | | | pfam00226(265,317)[41.7] \| COG0484(261,318) |
| | | | [41.9] : |
| | | | A(7,281636,441,20)$zz$DnaJ-class molecular |
| | | | chaperone & |
| | | | COG0484” |
| | | Questional_CDS | complement(20883..21146) |
| | | | /product=“orf(7,281636,441,74)$zz$ORF @ |
| | | | 17937-18201” |
| | | Questional_CDS | 21260..21499 |
| | | | /product=“orf(7,281636,441,75)$zz$ORF @ |
| | | | 18314-18554” |
| 88 | 0114922_10016519_organized | Padding | <1..9498 |
| | (Accession | | /label |
| | 0114922_10016519) | | |
| | | Annotated | complement(9499..9729) |
| | | | /product=“−> pfam04794(9,55)[49.5] \| |
| | | | COG3394(7,54)[44.6] |
| | | | :A(12,22447,16518,0)$zz$Predicted glycoside |
| | | | hydrolase |
| | | | ordeacetylase ChbG, UPF0249 family & COG3394” |
| | | Questional_CDS | 9500..9883 |
| | | | /product=“orf(12,22447,16518,1)$zz$Partial ORF @ 1-385” |
| | | Questional_CDS | complement(9500..9769) |
| | | | /product=“orf(12,22447,16518,2)$zz$Partial ORF @ 1-271” |
| | | Questional_CDS | complement(9501..9725) |
| | | | /product=“orf(12,22447,16518,3)$zz$Partial ORF @ 2-227” |
| | | Questional_CDS | 9514..9948 |
| | | | /product=“orf(12,22447,16518,4)$zz$Partial ORF @ 15-450” |
| | | Questional_CDS | complement(9940..10125) |
| | | | /product=“orf(12,22447,16518,5)$zz$ORF @ 441-627” |
| | | POI | 10000..12228 |
| | | | /product=“−> IscB(101,547)[186.8] : |
| | | | orf(12,22447,16518,6)$zz$ORF @ 501-2730” |
| | | Annotated | 10000..12228 |
| | | | /product=“−> IscB(101,547)[186.8] : |
| | | | orf(12,22447,16518,6)$zz$ORF @ 501-2730” |
| | | Questional_CDS | complement(10070..10237) |
| | | | /product=“orf(12,22447,16518,7)$zz$ORF @ 571-739” |
| | | CDS | 10173..12476 |
| | | | /product=“orf(12,22447,16518,8)$zz$ORF @ |
| | | | 674-2978” |
| | | CDS | complement(10234..11535) |
| | | | /product=“orf(12,22447,16518,9)$zz$ORF @ |
| | | | 735-2037” |
| | | Questional_CDS | complement(10701..11120) |
| | | | /product=“orf(12,22447,16518,10)$zz$ORF @ |
| | | | 1202-1622” |
| | | Questional_CDS | complement(11145..11462) |
| | | | /product=“orf(12,22447,16518,11)$zz$ORF @ |
| | | | 1646-1964” |
| | | Questional_CDS | 12157 |
| | | | /product=“orf(12,22447,16518,12)$zz$ORF @ |
| | | | 2389-2659” |
| | | DR | 12233..12260 |
| | | Questional_CDS | complement(12259..12600) |
| | | | /product=“orf(12,22447,16518,13)$zz$ORF @ |
| | | | 2760-3102” |
| | | DR | 12294..12321 |
| | | DR | 12355..12382 |
| | | Questional_CDS | 12380..12583 |
| | | | /product=“orf(12,22447,16518,14)$zz$ORF @ |
| | | | 2881-3085” |
| | | DR | 12416..12443 |
| | | DR | 12477..12504 |
| | | Questional_CDS | complement(12536..12820) |
| | | | /product=“orf(12,22447,16518,15)$zz$ORF @ |
| | | | 3037-3322” |
| | | DR | 12538..12565 |
| | | CDS | 12590..12817 |
| | | | /product=“A(12,22447,16518,2)$zz$hypothetical |
| | | | protein & |
| | | | Hypo-rule applied” |
| | | DR | 12599..12626 |
| | | Questional_CDS | complement(12631..12852) |
| | | | /product=“orf(12,22447,16518,16)$zz$ORF @ |
| | | | 3132-3354” |
| | | DR | 12660..12689 |
| | | DR | 12723..12750 |
| | | DR | 12785..12812 |
| | | Questional_CDS | 12810..13247 |
| | | | /product=“orf(12,22447,16518,17)$zz$ORF @ |
| | | | 3311-3749” |
| | | CDS | complement(13311..13484) |
| | | | /product=“A(12,22447,16518,3)$zz$hypothetical |
| | | | protein & Hypo-rule applied” |
| | | Questional_CDS | 13473..13724 |
| | | | /product=“orf(12,22447,16518,19)$zz$ORF @ |
| | | | 3974-4226” |
| | | CDS | 13508..13954 |
| | | | /product=“A(12,22447,16518,4)$zz$hypothetical |
| | | | protein & |
| | | | Hypo-rule applied” |
| | | | Questional_CDS complement(13879..14055) |
| | | | /product=“orf(12,22447,16518,21)$zz$ORF @ |
| | | | 4380-4557” |
| | | Questional_CDS | complement(13955..14419) |
| | | | /product=“orf(12,22447,16518,22)$zz$ORF @ |
| | | | 4456-4921” |
| | | CDS | 14003..14335 |
| | | | /product=“A(12,22447,16518,5)$zz$hypothetical |
| | | | protein & Hypo-rule applied” |
| | | Questional_CDS | 14332..14568 |
| | | | /product=“orf(12,22447,16518,24)$zz$ORF @ |
| | | | 4833-5070” |
| | | CDS | complement(14461..14685) |
| | | | /product=“A(12,22447,16518,6)$zz$hypothetical |
| | | | protein & Hypo-rule applied” |
| | | Questional_CDS | 14600..14833 |
| | | | /product=“orf(12,22447,16518,26)$zz$ORF @ |
| | | | 5101-5335” |
| | | CDS | 14785..15468 |
| | | | /product=“A(12,22447,16518,7)$zz$hypothetical |
| | | | protein & Hypo-rule applied” |
| | | Questional_CDS | complement(14970..15941) |
| | | | /product=“orf(12,22447,16518,28)$zz$ORF @ |
| | | | 5471-6443” |
| | | Questional_CDS | complement(15509..15709) |
| | | | /product=“orf(12,22447,16518,29)$zz$ORF @ |
| | | | 6010-6211” |
| | | Questional_CDS | 15648..16112 |
| | | | /product=“orf(12,22447,16518,30)$zz$ORF @ |
| | | | 6149-6614” |
| | | Questional_CDS | 15682..15891 |
| | | | /product=“orf(12,22447,16518,31)$zz$ORF @ |
| | | | 6183-6393” |
| | | Questional_CDS | complement(15948..16157) |
| | | | /product=“orf(12,22447,16518,32)$zz$Partial ORF @ 6449-6659” |
| | | CDS | 16058..16156 |
| | | | /product=“A(12,22447,16518,8)$zz$hypothetical |
| | | | protein & Hypo-rule applied” |
| 89 | 0315277_10040887_organized | Padding | <1..8170 |
| | (Accession | | /label |
| | 0315277_10040887) | | |
| | | Questional_CDS | 8172..8633 |
| | | | /product=“orf(7,281628,40886,0)$zz$Partial ORF @ 1-463” |
| | | Questional_CDS | complement(8883..9854) |
| | | | /product=“orf(7,281628,40886,1)$zz$ORF @ |
| | | | 712-1684” |
| | | Questional_CDS | 8928..9287 |
| | | | /product=“orf(7,281628,40886,2)$zz$ORF @ |
| | | | 757-1117” |
| | | Questional_CDS | 8981..9433) |
| | | | /product=“orf(7,281628,40886,3)$zz$ORF @ |
| | | | 810-1263” |
| | | DR | 8984..9011 |
| | | DR | 9048..9075 |
| | | DR | 9109..9136 |
| | | DR | 9170..9197 |
| | | DR | 9232..9259 |
| | | DR | 9295..9322 |
| | | Questional_CDS | complement(9322..9753) |
| | | | /product=“orf(7,281628,40886,4)$zz$ORF @ |
| | | | 1151-1583” |
| | | DR | 9359..9386 |
| | | Questional_CDS | 9394..9702 |
| | | | /product=“orf(7,281628,40886,5)$zz$ORF @ |
| | | | 1223-1532” |
| | | DR | 9420..9447 |
| | | Questional_CDS | 9470..9676 |
| | | | /product=“orf(7,281628,40886,6)$zz$ORF @ |
| | | | 1299-1506” |
| | | DR | 9481..9508 |
| | | DR | 9542..9569 |
| | | DR | 9603..9630 |
| | | Questional_CDS | complement(9892..10545) |
| | | | /product=“orf(7,281628,40886,7)$zz$ORF @ |
| | | | 1721-2375” |
| | | POI | 10000..12018 |
| | | | /product=“−> IscB(4,71)[53.7] \| IscB(240,571) |
| | | | [109.3] \| |
| | | | pfam14279(323,378)[40.0] \| pfam14239(1,80)[39.1] \| |
| | | | COG1403(299,388)[29.9] : |
| | | | A(7,281628,40886,0)$zz$5-methylcytosine-specific |
| | | | restriction endonuclease McrA & COG1403” |
| | | Annotated | 10000..12018 |
| | | | /product=“−> IscB(4,71)[53.7] \| IscB(240,571) |
| | | | [109.3] \| |
| | | | pfam14279(323,378)[40.0] \| pfam14239(1,80)[39.1] \| |
| | | | COG1403(299,388)[29.9] : |
| | | | A(7,281628,40886,0)$zz$5-methylcytosine-specific restriction endonuclease McrA & |
| | | | COG1403” |
| | | Questional_CDS | complement(10188..10406) |
| | | | /product=“orf(7,281628,40886,9)$zz$ORF @ |
| | | | 2017-2236” |
| | | Questional_CDS | 10350..10601 |
| | | | /product=“orf(7,281628,40886,10)$zz$ORF @ |
| | | | 2179-2431” |
| | | Questional_CDS | 10455..10877) /product=“orf(7,281628,40886,11)$zz$ORF @ |
| | | | 2284-2707” |
| | | Questional_CDS | 10881..11099 /product=“orf(7,281628,40886,12)$zz$ORF @ 2710-2929” |
| | | Questional_CDS | complement(11458..12012) /product=“orf(7,281628,40886,13)$zz$ORF @ 3287-3842” |
| | | Questional_CDS | complement(11571..11768) /product=“orf(7,281628,40886,14)$zz$ORF @ 3400-3598” |
| | | Questional_CDS | 11585..11755 /product=“orf(7,281628,40886,15)$zz$ORF @ 3414-3585” |
| | | Questional_CDS | complement(12573..13391) /product=“orf(7,281628,40886,16)$zz$ORF @ 4402-5221” |
| | | Questional_CDS | 12603..12836 /product=“orf(7,281628,40886,17)$zz$ORF @ 4432-4666” |
| | | Questional_CDS | complement(12773..12940) /product=“orf(7,281628,40886,18)$zz$ORF @ 4602-4770” |
| | | Annotated | 12849..13625 |
| | | | /product=“−> pfam11028(48,202)[132.7] : |
| | | | A(7,281628,40886,1)$zz$uncharacterized protein |
| | | | DUF2723 & pfam11028” |
| | | Questional_CDS | complement(13425..13598) /product=“orf(7,281628,40886,20)$zz$Partial ORF @ 5254- |
| | | | 5428” |
| 90 | 0315294_10042545_organized | Padding | <1..9257 |
| | (Accession | | /label |
| | 0315294_10042545) | | |
| | | Questional_CDS | 9260..9655 /product=“orf(7,281645,42544,0)$zz$Partial ORF @ 2-398” |
| | | DR | 9314..9349 |
| | | DR | 9380..9415 |
| | | Questional_CDS | 9426..9593 /product=“orf(7,281645,42544,1)$zz$ORF @ 168-336” |
| | | DR | 9446..9481 |
| | | DR | 9512..9547 |
| | | DR | 9577..9612 |
| | | DR | 9642..9677 |
| | | DR | 9708..9743 |
| | | POI | 10000..12309 |
| | | | /product=“−> IscB(28,91)[44.2] \| IscB(277,565) |
| | | | [91.3] \| |
| | | | pfam14279(363,410)[40.4] \| pfam14239(21,101) |
| | | | [36.7] : |
| | | | A(7,281645,42544,0)$zz$HNH endonuclease/RRXRR |
| | | | protein & |
| | | | pfam14279,pfam14239” |
| | | Annotated | 10000..12309 |
| | | | /product=“−> IscB(28,91)[44.2] \| IscB(277,565) |
| | | | [91.3] \| |
| | | | pfam14279(363,410)[40.4] \| pfam14239(21,101) |
| | | | [36.7] : A(7,281645,42544,0)$zz$HNH endonuclease/RRXRR |
| | | | protein & pfam14279,pfam14239” |
| | | Questional_CDS | complement(10161..10550) /product=“orf(7,281645,42544,3)$zz$ORF @ 903-1293” |
| | | Questional_CDS | complement(10243..10638) /product=“orf(7,281645,42544,4)$zz$ORF @ 985-1381” |
| | | Questional_CDS | 10313..10696 /product=“orf(7,281645,42544,5)$zz$ORF @, 1055-1439” |
| | | Questional_CDS | complement(10711..11070) /product=“orf(7,281645,42544,6)$zz$ORF @ 1453-1813” |
| | | Questional_CDS | complement(11091..11315) /product=“orf(7,281645,42544,7)$zz$ORF @ 1833-2058” |
| | | Questional_CDS | complement(11125..11415) /product=“orf(7,281645,42544,8)$zz$ORF @ 1867-2158” |
| | | Questional_CDS | complement(12120..12470) /product=“orf(7,281645,42544,9)$zz$ORF @ 2862-3213” |
| | | Annotated | 12705..13904 |
| | | | /product=“−> pfam13784(45,127)[94.3] \| |
| | | | pfam02661(133,239)[74.0] \| pfam11972(322,376) |
| | | | [31.5] \| COG3177(24,377)[222.4] : |
| | | | A(7,281645,42544,1)$zz$Fic family |
| | | | protein & COG3177” |
| | | Questional_CDS | complement(13844..14104) |
| | | | /product=“orf(7,281645,42544,12)$zz$Partial ORF @ 4586-4847” |
| 91 | a0315307_1000415_organized | Questional_CDS | 174..764 |
| | (Definition | | /product=“orf(4,281007,414,13)$zz$ORF @ |
| | Ga0315307_1000415) | | 3184-3775” /label=“orf(4,281007,414,13)$zz$ORF @ 3184-3775 CDS” |
| | | Questional_CDS | complement(222..533) /product=“orf(4,281007,414,14)$zz$ORF @ |
| | | | 3232-3544” /label=“orf(4,281007,414,14)$zz$ORF @ 3232-3544 CDS” |
| | | Questional_CDS | complement(496..681) /product=“orf(4,281007,414,15)$zz$ORF @ |
| | | | 3506-3692” /label=“orf(4,281007,414,15)$zz$ORF @ 3506-3692 CDS” |
| | | Questional_CDS | complement(696..920) |
| | | | /product=“orf(4,281007,414,16)$zz$ORF @ |
| | | | 3706-3931” |
| | | | /label=“orf(4,281007,414,16)$zz$ORF @ 3706-3931 CDS” |
| | | Questional_CDS | 891..1478 /product=“orf(4,281007,414,17)$zz$ORF @ |
| | | | 3901-4489” /label=“orf(4,281007,414,17)$zz$ORF @, 3901-4489 CDS” |
| | | Annotated | 919..4485 |
| | | | /product=“−> pfam00395(847,882)[23.3] \| |
| | | | pfam00395(760,805)[16.8] : |
| | | | A(4,281007,414,3)$zz$S-layer |
| | | | family protein/S-layer family protein & |
| | | | pfam00395,pfam00395” |
| | | | /label=“−> pfam00395(847,882)[23.3] \| |
| | | | pfam00395(760,805)[16.8] : |
| | | | A(4,281007,414,3)$zz$S-layer |
| | | | family protein/S-layer family protein & |
| | | | pfam00395,pfam00395 CDS” |
| | | CDS | complement(964..2433) /product=“orf(4,281007,414,19)$zz$ORF @ |
| | | | 3974-5444” /label=“orf(4,281007,414,19)$zz$ORF @ 3974-5444 CDS” |
| | | Questional_CDS | complement(1749..2060) /product=“orf(4,281007,414,20)$zz$ORF @ |
| | | | 4759-5071” /label=“orf(4,281007,414,20)$zz$ORF @ 4759-5071 CDS” |
| | | Questional_CDS | complement(2076..2273) /product=“orf(4,281007,414,21)$zz$ORF @ |
| | | | 5086-5284” /label=“orf(4,281007,414,21)$zz$ORF @ 5086-5284 CDS” |
| | | Questional_CDS | 2471..2710 /product=“orf(4,281007,414,22)$zz$ORF @ |
| | | | 5481-5721” /label=“orf(4,281007,414,22)$zz$ORF @ 5481-5721 CDS” |
| | | CDS | complement(2503..4152) /product=“orf(4,281007,414,23)$zz$ORF @ |
| | | | 5513-7163” /label=“orf(4,281007,414,23)$zz$ORF @ 5513-7163 CDS” |
| | | Questional_CDS | complement(2691..2957) /product=“orf(4,281007,414,24)$zz$ORF @ |
| | | | 5701-5968” /label=“orf(4,281007,414,24)$zz$ORF @, 5701-5968 CDS” |
| | | Questional_CDS | complement(4209..4421) /product=“orf(4,281007,414,25)$zz$ORF @ |
| | | | 7219-7432” /label=“orf(4,281007,414,25)$zz$ORF @ 7219-7432 CDS” |
| | | Questional_CDS | complement(4482..4946) /product=“orf(4,281007,414,26)$zz$ORF @ |
| | | | 7492-7957” /label=“orf(4,281007,414,26)$zz$ORF @ 7492-7957 CDS” |
| | | Questional_CDS | complement(4522..4692) /product=“orf(4,281007,414,27)$zz$ORF @ 7532-7703” |
| | | | /label=“orf(4,281007,414,27)$zz$ORF @ 7532-7703 CDS” |
| | | Annotated | 4636..6306 |
| | | | /product=“−> pfam00395(292,335)[37.8] \| |
| | | | pfam00395(227,270)[34.1] : |
| | | | orf(4,281007,414,28)$zz$ORF @ |
| | | | 7646-9317” |
| | | | /label=“−> pfam00395(292,335)[37.8] \| |
| | | | pfam00395(227,270)[34.1] : |
| | | | orf(4,281007,414,28)$zz$ORF @ |
| | | | 7646-9317 CDS” |
| | | Questional_CDS | 4679..4882 /product=“orf(4,281007,414,29)$zz$ORF @ |
| | | | 7689-7893” /label=“orf(4,281007,414,29)$zz$ORF @ 7689-7893 CDS” |
| | | Questional_CDS | complement(5056..6219) /product=“orf(4,281007,414,30)$zz$ORF @ |
| | | | 8066-9230” /label=“orf(4,281007,414,30)$zz$ORF @ 8066-9230 CDS” |
| | | Questional_CDS | 5951..6148 /product=“orf(4,281007,414,31)$zz$ORF @ |
| | | | 8961-9159” /label=“orf(4,281007,414,31)$zz$ORF @ 8961-9159 CDS” |
| | | Questional_CDS | complement(6464..6670) /product=“orf(4,281007,414,32)$zz$ORF @ 9474-9681” |
| | | | /label=“orf(4,281007,414,32)$zz$ORF @ 9474-9681 CDS” |
| | | Questional_CDS | complement(6564..7352) /product=“orf(4,281007,414,33)$zz$ORF @ |
| | | | 9574-10363” /label=“orf(4,281007,414,33)$zz$ORF @ 9574-10363 CDS” |
| | | Annotated | 6645..7367 |
| | | | /product=“−> pfam01522(58,197)[105.9] \| |
| | | | COG0726(7,232)[97.0] : |
| | | | A(4,281007,414,5)$zz$peptidoglycan/xylan/chitin |
| | | | deacetylase (PgdA/CDA1 family) & COG0726” |
| | | | /label=“−> pfam01522(58,197)[105.9] \| |
| | | | COG0726(7,232)[97.0] : A(4,281007,414,5)$zz$peptidoglycan/xylan/chitin deacetylase |
| | | | (PgdA/CDA1 family) & COG0726 CDS” |
| | | Questional_CDS | 6859..7062 /product=“orf(4,281007,414,35)$zz$ORF @ |
| | | | 9869-10073” /label=“orf(4,281007,414,35)$zz$ORF @ 9869-10073 CDS” |
| | | Questional_CDS | 7180..7833 /product=“orf(4,281007,414,36)$zz$ORF @ |
| | | | 10190-10844” /label=“orf(4,281007,414,36)$zz$ORF @ 10190-10844 CDS” |
| | | Annotated | 7367..8455 |
| | | | /product=“−> pfam00534(166,335)[135.7] \| |
| | | | pfam13439(15,159)[105.2] \| COG0438(3,360) |
| | | | [177.9] : A(4,281007,414,6)$zz$glycosyltransferase involved |
| | | | in cell wall biosynthesis & COG0438” |
| | | | /label=“−> pfam00534(166,335)[135.7] \| |
| | | | pfam13439(15,159)[105.2] \| COG0438(3,360) |
| | | | [177.9] : A(4,281007,414,6)$zz$glycosyltransferase involved |
| | | | in cell wall biosynthesis & COG0438 CDS” |
| | | Questional_CDS | complement(7732..8421) /product=“orf(4,281007,414,38)$zz$ORF @ |
| | | | 10742-11432” /label=“orf(4,281007,414,38)$zz$ORF @ 10742-11432 CDS” |
| | | Questional_CDS | 7882..8502 /product=“orf(4,281007,414,39)$zz$ORF @ |
| | | | 10892-11513” /label=“orf(4,281007,414,39)$zz$ORF @ 10892-11513 CDS” |
| | | Questional_CDS | complement(8540..8893) /product=“orf(4,281007,414,40)$zz$ORF @ |
| | | | 11550-11904” /label=“orf(4,281007,414,40)$zz$ORF @ 11550-11904 CDS” |
| | | Questional_CDS | complement(8809..9057) /product=“orf(4,281007,414,41)$zz$ORF @ |
| | | | 11819-12068” /label=“orf(4,281007,414,41)$zz$ORF @ 11819-12068 CDS” |
| | | DR | 9076..9103 /label=“DR” |
| | | DR | 9137..9164 /label=“DR” |
| | | Questional_CDS | 9381 |
| | | | /product=“orf(4,281007,414,42)$zz$ORF @ |
| | | | 12176-12392” /label=“orf(4,281007,414,42)$zz$ORF @ 12176-12392 CDS” |
| | | Questional_CDS | 9170..9421 |
| | | | /product=“orf(4,281007,414,43)$zz$ORF @ |
| | | | 12180-12432” |
| | | | /label=“orf(4,281007,414,43)$zz$ORF @ 12180-12432 CDS” |
| | | DR | 9199..9226 /label=“DR” |
| | | DR | 9260..9287 /label=“DR” |
| | | DR | 9321..9348 /label=“DR” |
| | | DR | 9382..9409 /label=“DR” |
| | | DR | 9443..9470 /label=“DR” |
| | | DR | 9504..9531 /label=“DR” |
| | | DR | 9565..9592 /label=“DR” |
| | | Questional_CDS | complement(9622..9963) |
| | | | /product=“orf(4,281007,414,44)$zz$ORF @ |
| | | | 12632-12974” |
| | | | /label=“orf(4,281007,414,44)$zz$ORF @ 12632-12974 CDS” |
| | | Questional_CDS | complement(9873..10181) |
| | | | /product=“orf(4,281007,414,45)$zz$ORF @ |
| | | | 12883-13192” |
| | | | /label=“orf(4,281007,414,45)$zz$ORF @ 12883-13192 CDS” |
| | | POI | 10000..12066 |
| | | | /product=“−> IscB(6,85)[34.5] \| IscB(252,473) |
| | | | [106.9] \| |
| | | | pfam14279(337,390)[41.6] \| pfam14239(1,95)[29.7] \| |
| | | | COG1403(314,399)[27.6] : |
| | | | A(4,281007,414,7)$zz$5-methylcytosine-specific |
| | | | Restriction endonuclease McrA & COG1403” |
| | | | /label=“−> IscB(6,85)[34.5] \| IscB(252,473) |
| | | | [106.9] \| |
| | | | pfam14279(337,390)[41.6] \| pfam14239(1,95)[29.7] \| |
| | | | COG1403(314,399)[27.6] : |
| | | | A(4,281007,414,7)$zz$5-methylcytosine-specific |
| | | | Restriction endonuclease McrA & COG1403 POI” |
| | | Annotated | 10000..12066 |
| | | | /product=“−> IscB(6,85)[34.5] \| IscB(252,473) |
| | | | [106.9] \| pfam14279(337,390)[41.6] \| pfam14239(1,95)[29.7] \| |
| | | | COG1403(314,399)[27.6] : |
| | | | A(4,281007,414,7)$zz$5-methylcytosine-specific |
| | | | Restriction endonuclease McrA & COG1403” |
| | | | /label=“−> IscB(6,85)[34.5] \| IscB(252,473) |
| | | | [106.9] \| pfam14279(337,390)[41.6] \| pfam14239(1,95)[29.7] \| |
| | | | COG1403(314,399)[27.6] : |
| | | | A(4,281007,414,7)$zz$5-methylcytosine-specific |
| | | | Restriction endonuclease McrA & COG1403 CDS” |
| | | Questional_CDS | complement(10230..10448) /product=“orf(4,281007,414,47)$zz$ORF @ |
| | | | 13240-13459” /label=“orf(4,281007,414,47)$zz$ORF @, 13240-13459 CDS” |
| | | Questional_CDS | complement(10584..10793) /product=“orf(4,281007,414,48)$zz$ORF @ |
| | | | 13594-13804” /label=“orf(4,281007,414,48)$zz$ORF @ 13594-13804 CDS” |
| | | Questional_CDS | 10811..11239 /product=“orf(4,281007,414,49)$zz$ORF @ |
| | | | 13821-14250” /label=“orf(4,281007,414,49)$zz$ORF @ 13821-14250 CDS” |
| | | Questional_CDS | complement(11400..11804) /product=“orf(4,281007,414,50)$zz$ORF @ |
| | | | 14410-14815” /label=“orf(4,281007,414,50)$zz$ORF @ 14410-14815 CDS” |
| | | Questional_CDS | complement(11907..12644) /product=“orf(4,281007,414,51)$zz$ORF @ |
| | | | 14917-15655” /label=“orf(4,281007,414,51)$zz$ORF @ 14917-15655 CDS” |
| | | CDS | 12184..12378 /product=“ A(4,281007,414,8)$zz$hypothetical protein” |
| | | | /label=“A(4,281007,414,8)$zz$hypothetical protein CDS” |
| | | CDs | 12299..13657 /product=“orf(4,281007,414,53)$zz$ORF @ 15309-16668” |
| | | | /label=“orf(4,281007,414,53)$zz$ORF @ 15309-16668 CDS” |
| | | Annoated | complement(12428..13444) |
| | | | /product=“−> pfam02826(121,298)[148.6] \| |
| | | | COG0111(15,335)[206.4] : |
| | | | A(4,281007,414,9)$zz$phosphoglycerate |
| | | | dehydrogenase-like |
| | | | enzyme & COG0111” |
| | | | /label=“−> pfam02826(121,298)[148.6] \| |
| | | | COG0111(15,335)[206.4] : |
| | | | A(4,281007,414,9)$zz$phosphoglycerate |
| | | | dehydrogenase-like |
| | | | enzyme & COG0111 CDS” |
| | | Questional_CDS | complement(12457..12630) |
| | | | /product=“orf(4,281007,414,55)$zz$ORF @ |
| | | | 15467-15641” |
| | | | /label=“orf(4,281007,414,55)$zz$ORF @ 15467-15641 CDS” |
| | | Questional_CDS | 13462..14064 |
| | | | /product=“orf(4,281007,414,56)$zz$ORF @ |
| | | | 16472-17075” |
| | | | /label=“orf(4,281007,414,56)$zz$ORF @ 16472-17075 CDS” |
| | | Questional_CDS | 13467..13853 |
| | | | /product=“orf(4,281007,414,57)$zz$ORF @ |
| | | | 16477-16864” |
| | | | /label=“orf(4,281007,414,57)$zz$ORF @ 16477-16864 CDS” |
| | | Annotated | complement(13483..13929) |
| | | | /product=“−> pfam03692(13,128)[31.6] : |
| | | | A(4,281007,414,10)$zz$putative zinc- or ironchelating |
| | | | protein & pfam03692” |
| | | | /label=“−> pfam03692(13,128)[31.6] : |
| | | | A(4,281007,414,10)$zz$putative zinc- or ironchelating |
| | | | protein & pfam03692 CDS” |
| | | Questional_CDS | 13974..14168 |
| | | | /product=“orf(4,281007,414,59)$zz$ORF @ |
| | | | 16984-17179” |
| | | | /label=“orf(4,281007,414,59)$zz$ORF @ 16984-17179 CDS” |
| | | CDS | complement(14203..14382) |
| | | | /product=“A(4,281007,414,11)$zz$hypothetical |
| | | | protein” /label=“A(4,281007,414,11)$zz$hypothetical |
| | | | protein CDS” |
| | | Questional_CDS | complement(14276..14551) |
| | | | /product=“orf(4,281007,414,61)$zz$ORF @ |
| | | | 17286-17562” |
| | | | /label=“orf(4,281007,414,61)$zz$ORF @ 17286-17562 CDS” |
| | | Questional_CDS | 14502..14834 |
| | | | /product=“orf(4,281007,414,62)$zz$ORF @ |
| | | | 17512-17845” |
| | | | /label=“orf(4,281007,414,62)$zz$ORF @ 17512-17845 CDS” |
| 92 | 0315279_10036605_organized | Padding | <1..8579 |
| | (Accession | | /label |
| | 0315279_10036605) | | |
| | | CDS | 8581..9852 /product=“ A(7,281630,36604,0)$zz$hypothetical protein” |
| | | CDS | complement(8581..11118) /product=“orf(7,281630,36604,0)$zz$Partial ORF @ 1-2539” |
| | | CDS | 8602..9849 /product=“orf(7,281630,36604,1)$zz$Partial ORF @ 22-1270” |
| | | CDS | 9072..10865 /product=“orf(7,281630,36604,2)$zz$ORF @ 492-2286” |
| | | Questional_CDS | complement(9294..9695) /product=“orf(7,281630,36604,3)$zz$ORF @ 714-1116” |
| | | Questional_CDS | 9696..10001) /product=“orf(7,281630,36604,4)$zz$ORF @ 1116-1422” |
| | | POI | 10000..11919 /product=“−> IscB(4,65)[47.6] \| IscB(205,450) |
| | | | [139.4] \| pfam14279(284,339)[43.2] \| pfam14239(2,73)[33.2] \| |
| | | | pfam14239(200,264)[30.7] \| COG1403(252,350) |
| | | | [43.0] : A(7,281630,36604,1)$zz$5-methylcytosine-specific restriction endonuclease |
| | | | McrA & COG1403” |
| | | Annotated | 10000..11919 |
| | | | /product=“−> IscB(4,65)[47.6] \| IscB(205,450) |
| | | | [139.4] \| pfam14279(284,339)[43.2] \| pfam14239(2,73)[33.2] \| |
| | | | pfam14239(200,264)[30.7] \| COG1403(252,350) |
| | | | [43.0] : A(7,281630,36604,1)$zz$5-methylcytosine-specific restriction endonuclease |
| | | | McrA & COG1403” |
| | | Questional_CDS | complement(10266..10703) /product=“orf(7,281630,36604,6)$zz$ORF @ 1686-2124 |
| | | Questional_CDS | 10962..11762 /product=“orf(7,281630,36604,7)$zz$ORF @ 2382-3183” |
| | | Questional_CDS | 11258..11437 /product=“orf(7,281630,36604,8)$zz$ORF @ 2678-2858” |
| | | Questional_CDS | complement(11275..11628) /product=“orf(7,281630,36604,9)$zz$ORF @ 2695-3049” |
| | | Questional_CDS | complement(11704..12024) /product=“orf(7,281630,36604,10)$zz$ORF @ 3124-3445” |
| | | Questional_CDS | complement(11916..12395) /product=“orf(7,281630,36604,11)$zz$ORF @ 3336-3816” |
| | | DR | 12006..12033 |
| | | Questional_CDS | 12023..12403 /product=“orf(7,281630,36604,12)$zz$ORF @ 3443-3824” |
| | | Questional_CDS | complement(12062..12334) /product=“orf(7,281630,36604,13)$zz$ORF @ 3482-3755” |
| | | DR | 12067..12094 |
| | | Questional_CDS | complement(12109..12972) /product=“orf(7,281630,36604,14)$zz$ORF @ 3529-4393” |
| | | DR | 12129..12156 |
| | | DR | 12190..12217 |
| | | DR | 12253..12280 |
| | | DR | 12316..12343 |
| | | DR | 12377..12404 |
| | | DR | 12439..12466 |
| | | DR | 12500..12527 |
| | | DR | 12562..12589 |
| | | Questional_CDS | 12579..12791 /product=“orf(7,281630,36604,15)$zz$ORF @ 3999-4212” |
| | | Questional_CDS | 12797..13066 /product=“orf(7,281630,36604,16)$zz$ORF @ 4217-4487” |
| | | Questional_CDS | complement(12858..13025) /product=“orf(7,281630,36604,17)$zz$ORF @ 4278-4446” |
| | | Questional_CDS | complement(13046..13453) /product=“orf(7,281630,36604,18)$zz$Partial ORF @ 4466- |
| | | | 4874” |
| | | Questional_CDS | 13074..13325 /product=“orf(7,281630,36604,19)$zz$ORF @ 4494-4746” |
| | | Annotated | complement(13117..13452) /product=“−> pfam00291(1,100)[45.2] \| |
| | | | COG0031(1,109)[107.1] : A(7,281630,36604,3)$zz$cysteine synthase A & |
| | | | KO:K01738” |
| | | Annotated | complement(13120..13452) /product=“−> pfam00291(1,100)[45.2] \| |
| | | | COG0031(1,109)[107.1] : orf(7,281630,36604,20)$zz$Partial ORF @ 4540-4873” |
| | | Questional_CDS | 13271..13453 /product=“orf(7,281630,36604,21)$zz$Partial ORF @ 4691-4874” |

TABLE 15
Geneious Features and Annotations for SEQ ID NOs: 93-133 (See
also Appendix B of U.S. Provisional Application No. 62/962,672)

| SEQ | | | |
|---|---|---|---|
| ID | | | |
| NO: | Name | Features | Location/Qualifiers |
| 93 | 0214473_10157847 | POI | 2..2635 |
| | (Accession | | /product=“−> IscB(2,169)[28.3] \| IscB(372,447) |
| | 0214473_10157847) | | [31.8] \| |
| | | | pfam13395(408,456)[29.9] : |
| | | | A(4,280878,157846,0)$zz$HNH |
| | | | endonuclease & pfam13395” |
| | | CDS | 2..2635 |
| | | | /product=“−> IscB(2,169)[28.3] \| IscB(372,447) |
| | | | [31.8] \| |
| | | | pfam13395(408,456)[29.9] : |
| | | | A(4,280878,157846,0)$zz$HNH |
| | | | endonuclease & pfam13395” |
| | | CDS | complement(2..190) |
| | | | /product=“orf(4,280878,157846,1)$zz$Partial ORF @ |
| | | | 1-190” |
| | | CDS | complement(280..597) |
| | | | /product=“orf(4,280878,157846,2)$zz$ORF @ |
| | | | 279-597” |
| | | CDS | complement(598..846) |
| | | | /product=“orf(4,280878,157846,3)$zz$ORF @ |
| | | | 597-846” |
| | | CDS | complement(1094..1270) |
| | | | /product=“orf(4,280878,157846,4)$zz$ORF @ |
| | | | 1093-1270” |
| | | CDS | complement(1361..1744) |
| | | | /product=“orf(4,280878,157846,5)$zz$ORF @ |
| | | | 1360-1744” |
| | | CDS | 1404..1763 |
| | | | /product=“orf(4,280878,157846,6)$zz$ORF @ |
| | | | 1403-1763” |
| | | CDS | complement(1808..1981) |
| | | | /product=“orf(4,280878,157846,7)$zz$ORF @ |
| | | | 1807-1981” |
| 94 | 0315274_10011761 | CDS | complement(2..244) |
| | (Accession | | /product=“orf(7,281625,11760,0)$zz$Partial ORF @ |
| | 0315274_10011761) | | 1-244” |
| | | CDS | 3..806 |
| | | | /product=“−> pfam00497(6,237)[163.2] \| |
| | | | COG0834(1,247)[173.7] : orf(7,281625,11760,1)$zz$Partial |
| | | | ORF @ 2-806” |
| | | CDS | 3..809 |
| | | | /product=“−> pfam00497(6,237)[163.2] \| |
| | | | COG0834(1,247)[173.7] : |
| | | | A(7,281625,11760,0)$zz$glutamate/aspartate transport |
| | | | system substrate-binding protein & KO:K10001” |
| | | CDS | complement(3..815) |
| | | | /product=“orf(7,281625,11760,2)$zz$Partial ORF @ 2-815” |
| | | CDS | complement(861..1076) |
| | | | /product=“orf(7,281625,11760,3)$zz$ORF @ 860-1076” |
| | | CDS | 971..1687 |
| | | | /product=“−> pfam00528(39,232)[63.2] \| |
| | | | COG0765(4,234)[203.8] : |
| | | | A(7,281625,11760,1)$zz$glutamate/aspartate transport |
| | | | system permease protein & KO:K10003” |
| | | CDS | 1027..1332 |
| | | | /product=“orf(7,281625,11760,5)$zz$ORF @ 1026-1332” |
| | | CDS | complement(1385..1705) |
| | | | /product=“orf(7,281625,11760,6)$zz$ORF @ 1384-1705” |
| | | CDS | 1689..2345 |
| | | | /product=“−> pfam00528(30,214)[68.8] \| |
| | | | COG0765(1,216)[192.3] : |
| | | | A(7,281625,11760,2)$zz$glutamate/aspartate transport |
| | | | system permease protein & KO:K10002” |
| | | CDS | complement(2299..2481) |
| | | | /product=“orf(7,281625,11760,8)$zz$ORF @ 2298-2481” |
| | | CDS | 2342..3067 |
| | | | /product=“−> pfam00005(17,165)[124.4] \| |
| | | | COG1126(1,240)[382.5] : A(7,281625,11760,3)$zz$polar amino |
| | | | acid transport system ATP-binding |
| | | | protein/glutamate/aspartate transport system ATP-binding |
| | | | protein & KO:K02028,KO:K10004” |
| | | CDS | complement(2534..3166) |
| | | | /product=“orf(7,281625,11760,10)$zz$ORF @ 2533-3166” |
| | | CDS | 2952..3815 |
| | | | /product=“−> pfam01177(1,218)[171.1] \| |
| | | | COG1794(1,224)[172.9] : orf(7,281625,11760,11)$zz$ORF @ |
| | | | 2951-3815” |
| | | CDS | complement(3273..3443) |
| | | | /product=“orf(7,281625,11760,12)$zz$ORF @ 3272-3443” |
| | | CDS | 3436..3717 |
| | | | /product=“orf(7,281625,11760,13)$zz$ORF @ 3435-3717” |
| | | CDS | complement(4003..4980) |
| | | | /product=“orf(7,281625,11760,14)$zz$ORF @ 4002-4980” |
| | | CDS | 4033..5037 |
| | | | /product=“−> pfam00291(9,318)[180.3] \| |
| | | | COG2515(1,330)[348.7] : A(7,281625,11760,5)$zz$D-cysteine |
| | | | desulfhydrase & KO:K05396” |
| | | CDS | 4625..4843 |
| | | | /product=“orf(7,281625,11760,16)$zz$ORF @ 4624-4843” |
| | | CDS | complement(5051..5368) |
| | | | /product=“orf(7,281625,11760,17)$zz$ORF @ 5050-5368” |
| | | CDS | 5278..5481 |
| | | | /product=“orf(7,281625,11760,18)$zz$ORF @ 5277-5481” |
| | | CDS | 5743..8607 |
| | | | /product=“−> IscB(3,171)[30.9] \| IscB(374,449)[32.0] \| |
| | | | pfam14239(1,179)[28.0] \| pfam13395(410,458)[25.9] : |
| | | | A(7,281625,11760,6)$zz$RRXRR protein/HNH endonuclease & |
| | | | pfam14239,pfam13395” |
| | | CDS | 5743..8607 |
| | | | /product=“−> IscB(3,171)[30.9] \| IscB(374,449)[32.0] \| |
| | | | pfam14239(1,179)[28.0] \| pfam13395(410,458)[25.9] : |
| | | | A(7,281625,11760,6)$zz$RRXRR protein/HNH endonuclease & |
| | | | pfam14239,pfam13395” |
| | | CDS | complement(6241..6447) |
| | | | /product=“orf(7,281625,11760,20)$zz$ORF @ 6240-6447” |
| | | CDS | complement(6535..7017) |
| | | | /product=“orf(7,281625,11760,21)$zz$ORF @ 6534-7017” |
| | | CDS | complement(6872..7078) |
| | | | /product=“orf(7,281625,11760,22)$zz$ORF @ 6871-7078” |
| | | CDS | 7166..7510 |
| | | | /product=“orf(7,281625,11760,23)$zz$ORF @ 7165-7510” |
| | | CDS | complement(7555..7902) |
| | | | /product=“orf(7,281625,11760,24)$zz$ORF @ 7554-7902” |
| | | CDS | complement(7914..8108) |
| | | | /product=“orf(7,281625,11760,25)$zz$ORF @ 7913-8108” |
| | | DR | 8807..8843 |
| | | DR | 8880..8916 |
| | | CDS | 8937..9110 |
| | | | /product=“orf(7,281625,11760,26)$zz$ORF @ 8936-9110” |
| | | DR | 8952..8988 |
| | | DR | 9024..9060 |
| | | DR | 9095..9131 |
| | | DR | 9166..9202 |
| | | DR | 9238..9274 |
| | | DR | 9309..9345 |
| | | DR | 9380..9416 |
| | | CDS | complement(9785..9952) |
| | | | /product=“orf(7,281625,11760,27)$zz$ORF @ 9784-9952” |
| | | CDS | 9837..10400 |
| | | | /product=“A(7,281625,11760,7)$zz$hypothetical protein” |
| | | CDS | complement(10092..10289) |
| | | | /product=“orf(7,281625,11760,29)$zz$ORF @ 10091-10289” |
| | | CDS | complement(10576..10896) |
| | | | /product=“orf(7,281625,11760,30)$zz$ORF @ 10575-10896” |
| | | CDS | 10595..11545 |
| | | | /product=“−> pfam02540(146,310)[125.4] \| |
| | | | pfam02540(21,115)[86.9] \| COG0171(14,315)[208.5] : |
| | | | A(7,281625,11760,8)$zz$NAD+ synthase & KO:K01916” |
| | | CDS | 11523..11660 |
| | | | /product=“A(7,281625,11760,9)$zz$hypothetical protein” |
| | | CDS | 11732..12112 |
| | | | /product=“A(7,281625,11760,10)$zz$hypothetical protein” |
| | | CDS | complement(12231..12530) |
| | | | /product=“orf(7,281625,11760,33)$zz$Partial ORF @ |
| | | | 12230-12530” |
| | | CDS | 12456..12530 |
| | | | /product=“A(7,281625,11760,11)$zz$hypothetical protein” |
| 95 | 0181520_10000764 | CDS | 461..772 |
| | (Accession | | /product=“orf(18,33974,763,103)$zz$ORF @ 32160-32472” |
| | 0181520_10000764) | | |
| | | CDS | 663..1013 |
| | | | /product=“orf(18,33974,763,104)$zz$ORF @ 32362-32713” |
| | | CDS | complement(704..898) |
| | | | /product=“orf(18,33974,763,105)$zz$ORF @ 32403-32598” |
| | | CDS | complement(723..2675) |
| | | | /product=“−> pfam13414(489,529)[38.0] \| |
| | | | pfam13424(411,479)[37.9] \| pfam13231(68,230)[26.1] \| |
| | | | pfam07719(515,548)[23.8] \| pfam07721(591,614)[13.3] \| |
| | | | COG0457(308,561)[74.7] : |
| | | | A(18,33974,763,13)$zz$Tetratricopeptide (TPR) repeat & |
| | | | COG0457” |
| | | CDS | 881..1063 |
| | | | /product=“orf(18,33974,763,107)$zz$ORF @ 32580-32763” |
| | | CDS | 1065..1670 |
| | | | /product=“orf(18,33974,763,108)$zz$ORF @ 32764-33370” |
| | | CDS | complement(1070..1237) |
| | | | /product=“orf(18,33974,763,109)$zz$ORF @ 32769-32937” |
| | | CDS | complement(1324..2061) |
| | | | /product=“orf(18,33974,763,110)$zz$ORF @ 33023-33761” |
| | | CDS | 2292..2837 |
| | | | /product=“orf(18,33974,763,111)$zz$ORF @ 33991-34537” |
| | | CDS | 2665..2916 |
| | | | /product=“orf(18,33974,763,112)$zz$ORF @ 34364-34616” |
| | | CDS | complement(2704..2880) |
| | | | /product=“orf(18,33974,763,113)$zz$ORF @ 34403-34580” |
| | | CDS | complement(2934..3089) |
| | | | /product=“A(18,33974,763,14)$zz$hypothetical protein & |
| | | | Hypo-rule applied” |
| | | CDS | 3054..3293 |
| | | | /product=“orf(18,33974,763,114)$zz$ORF @ 34753-34993” |
| | | CDS | 3089..3733 |
| | | | /product=“orf(18,33974,763,115)$zz$ORF @ 34788-35433” |
| | | CDS | complement(3439..3606) |
| | | | /product=“orf(18,33974,763,116)$zz$ORF @ 35138-35306” |
| | | CDS | complement(3610..3867) |
| | | | /product=“orf(18,33974,763,117)$zz$ORF @ 35309-35567” |
| | | CDS | complement(3915..4616) |
| | | | /product=“orf(18,33974,763,118)$zz$ORF @ 35614-36316” |
| | | CDS | 3918..4724 |
| | | | /product=“−> pfam00977(5,238)[291.2] \| |
| | | | COG0107(1,256)[377.5] : A(18,33974,763,16)$zz$cyclase & |
| | | | KO:K02500” |
| | | CDS | 3949..4134 |
| | | | /product=“orf(18,33974,763,120)$zz$ORF @ 35648-35834” |
| | | CDS | complement(4082..4354) |
| | | | /product=“orf(18,33974,763,121)$zz$ORF @ 35781-36054” |
| | | CDS | complement(4486..4728) |
| | | | /product=“orf(18,33974,763,122)$zz$ORF @ 36185-36428” |
| | | CDS | complement(4721..5740) |
| | | | /product=“orf(18,33974,763,123)$zz$ORF @ 36420-37440” |
| | | CDS | 4727..5878 |
| | | | /product=“−> pfam00437(25,293)[122.2] \| |
| | | | COG2805(16,374)[383.3] : A(18,33974,763,17)$zz$twitching |
| | | | motility protein PilT & KO:K02669” |
| | | CDS | complement(4750..5100) |
| | | | /product=“orf(18,33974,763,125)$zz$ORF @ 36449-36800” |
| | | CDS | complement(5242..5436) |
| | | | /product=“orf(18,33974,763,126)$zz$ORF @ 36941-37136” |
| | | CDS | complement(5437..7071) |
| | | | /product=“orf(18,33974,763,127)$zz$ORF @ 37136-38771” |
| | | CDS | 5911..7731 |
| | | | /product=“−> pfam00437(219,490)[49.3] \| |
| | | | COG2804(131,606)[171.5] : A(18,33974,763,18)$zz$Type II |
| | | | secretory pathway ATPase GspE/PulE or T4P pilus assembly |
| | | | pathway ATPase PilB & COG2804” |
| | | CDS | 6396..7748 |
| | | | /product=“orf(18,33974,763,129)$zz$ORF @ 38095-39448” |
| | | CDS | complement(6428..6601) |
| | | | /product=“orf(18,33974,763,130)$zz$ORF @ 38127-38301” |
| | | CDS | 6803..7252 |
| | | | /product=“orf(18,33974,763,131)$zz$ORF @ 38502-38952” |
| | | CDS | complement(7107..7439) |
| | | | /product=“orf(18,33974,763,132)$zz$ORF @ 38806-39139” |
| | | CDS | complement(7129..8364) |
| | | | /product=“orf(18,33974,763,133)$zz$ORF @ 38828-40064” |
| | | CDS | 7385..7648 |
| | | | /product=“orf(18,33974,763,134)$zz$ORF @ 39084-39348” |
| | | CDS | complement(7691..8356) |
| | | | /product=“orf(18,33974,763,135)$zz$ORF @ 39390-40056” |
| | | CDS | 7745..8383 |
| | | | /product=“−> pfam02674(5,139)[48.8] : |
| | | | A(18,33974,763,19)$zz$Colicin V production protein & |
| | | | pfam02674” |
| | | CDS | 8407..9141 |
| | | | /product=“A(18,33974,763,20)$zz$hypothetical protein & |
| | | | Hypo-rule applied” |
| | | CDS | 9528..9713 |
| | | | /product=“orf(18,33974,763,138)$zz$ORF @ 41227-41413” |
| | | DR | 9562..9589 |
| | | DR | 9627..9663 |
| | | DR | 9698..9734 |
| | | DR | 9771..9807 |
| | | CDS | complement(9817..10041) |
| | | | /product=“orf(18,33974,763,139)$zz$ORF @ 41516-41741” |
| | | POI | 10001..12142 |
| | | | /product=“−> IscB(2,161)[27.4] \| IscB(350,451)[40.1] \| |
| | | | pfam14239(1,167)[26.3] \| pfam13395(407,452)[26.1] : |
| | | | A(18,33974,763,21)$zz$RRXRR protein/HNH endonuclease & |
| | | | pfam14239,pfam13395” |
| | | CDS | 10001..12142 |
| | | | /product=“−> IscB(2,161)[27.4] \| IscB(350,451)[40.1] \| |
| | | | pfam14239(1,167)[26.3] \| pfam13395(407,452)[26.1] : |
| | | | A(18,33974,763,21)$zz$RRXRR protein/HNH endonuclease & |
| | | | pfam14239,pfam13395” |
| | | CDS | 10062..10424 |
| | | | /product=“orf(18,33974,763,141)$zz$ORF @ 41761-42124” |
| | | CDS | complement(10125..10655) |
| | | | /product=“orf(18,33974,763,142)$zz$ORF @ 41824-42355” |
| | | CDS | complement(10421..11431) |
| | | | /product=“orf(18,33974,763,143)$zz$ORF @ 42120-43131” |
| | | CDS | 10425..10793 |
| | | | /product=“orf(18,33974,763,144)$zz$ORF @ 42124-42493” |
| | | CDS | 11166..11369 |
| | | | /product=“orf(18,33974,763,145)$zz$ORF @ 42865-43069” |
| | | CDS | complement(11600..12229) |
| | | | /product=“orf(18,33974,763,146)$zz$ORF @ 43299-43929” |
| | | CDS | complement(12079..12246) |
| | | | /product=“orf(18,33974,763,147)$zz$ORF @ 43778-43946” |
| | | CDS | 12170..12964 |
| | | | /product=“orf(18,33974,763,148)$zz$ORF @ 43869-44664” |
| | | CDS | complement(13034..15979) |
| | | | /product=“−> pfam00176(348,606)[120.4] \| |
| | | | pfam00271(623,736)[80.6] \| COG0553(282,793)[321.9] : |
| | | | orf(18,33974,763,149)$zz$ORF @ 44733-47679” |
| | | CDS | complement(13162..13344) |
| | | | /product=“orf(18,33974,763,150)$zz$ORF @ 44861-45044” |
| | | CDS | 13557..13901 |
| | | | /product=“orf(18,33974,763,151)$zz$ORF @ 45256-45601” |
| | | CDS | 13562..14248 |
| | | | /product=“orf(18,33974,763,152)$zz$ORF @ 45261-45948” |
| | | CDS | 13944..14168 |
| | | | /product=“orf(18,33974,763,153)$zz$ORF @ 45643-45868” |
| | | CDS | complement(14014..14289) |
| | | | /product=“orf(18,33974,763,154)$zz$ORF @ 45713-45989” |
| | | CDS | 14534..15694 |
| | | | /product=“orf(18,33974,763,155)$zz$ORF @ 46233-47394” |
| | | CDS | 14826..15035 |
| | | | /product=“orf(18,33974,763,156)$zz$ORF @ 46525-46735” |
| | | CDS | complement(14854..15120) |
| | | | /product=“orf(18,33974,763,157)$zz$ORF @ 46553-46820” |
| | | CDS | complement(14868..15785) |
| | | | /product=“orf(18,33974,763,158)$zz$ORF @ 46567-47485” |
| | | CDS | 15803..15976 |
| | | | /product=“orf(18,33974,763,159)$zz$ORF @ 47502-47676” |
| | | CDS | 15834..16007 |
| | | | /product=“orf(18,33974,763,160)$zz$ORF @ 47533-47707” |
| | | CDS | complement(15924..16202) |
| | | | /product=“orf(18,33974,763,161)$zz$ORF @ 47623-47902” |
| | | CDS | complement(16021..17568) |
| | | | /product=“orf(18,33974,763,162)$zz$ORF @ 47720-49268” |
| | | CDS | 16120..17601 |
| | | | /product=“−> pfam13184(199,267)[90.1] \| |
| | | | pfam08529(5,63)[45.5] \| pfam08529(59,94)[23.7] \| |
| | | | COG0195(126,323)[230.4] : A(18,33974,763,24)$zz$N |
| | | | utilization substance protein A & KO:K02600” |
| | | CDS | complement(16263..16454) |
| | | | /product=“orf(18,33974,763,164)$zz$ORF @ 47962-48154” |
| | | CDS | complement(16461..16703) |
| | | | /product=“orf(18,33974,763,165)$zz$ORF @ 48160-48403” |
| | | CDS | 17585..17911 |
| | | | /product=“orf(18,33974,763,166)$zz$ORF @ 49284-49611” |
| | | CDS | 17667..20429 |
| | | | /product=“−> pfam00009(417,580)[122.8] \| |
| | | | pfam11987(704,810)[111.4] \| pfam03144(841,909)[35.8] \| |
| | | | COG0532(414,920)[481.4] : |
| | | | A(18,33974,763,25)$zz$translation initiation factor IF-2 & |
| | | | KO:K02519” |
| | | CDS | complement(17688..17867) |
| | | | /product=“orf(18,33974,763,167)$zz$ORF @ 49387-49567” |
| | | CDS | complement(17915..18358) |
| | | | /product=“orf(18,33974,763,169)$zz$ORF @ 49614-50058” |
| | | CDS | complement(17985..18620) |
| | | | /product=“orf(18,33974,763,170)$zz$ORF @ 49684-50320” |
| | | CDS | 18343..18534 |
| | | | /product=“orf(18,33974,763,171)$zz$ORF @ 50042-50234” |
| | | CDS | complement(18386..18988) |
| | | | /product=“orf(18,33974,763, 172)$zz$ORF @ 50085-50688” |
| | | CDS | 18577..18930 |
| | | | /product=“orf(18,33974,763,173)$zz$ORF @ 50276-50630” |
| | | CDS | complement(18804..20402) |
| | | | /product=“orf(18,33974,763,174)$zz$ORF @ 50503-52102” |
| | | CDS | complement(19037..19225) |
| | | | /product=“orf(18,33974,763, 175)$zz$ORF @ 50736-50925” |
| | | CDS | complement(19277..19489) |
| | | | /product=“orf(18,33974,763,176)$zz$ORF @ 50976-51189” |
| | | CDS | 19316..19804 |
| | | | /product=“orf(18,33974,763,177)$zz$ORF @ 51015-51504” |
| | | CDS | complement(20072..20242) |
| | | | /product=“orf(18,33974,763,178)$zz$ORF @ 51771-51942” |
| | | CDS | 20476..20895 |
| | | | /product=“−> pfam02033(5,108)[87.2] \| |
| | | | COG0858(1,116)[95.5]: |
| | | | A(18,33974,763,26)$zz$ribosome-binding factor A |
| | | | &KO:K02834” |
| | | CDS | complement(20877..21326) |
| | | | /product=“orf(18,33974,763,180)$zz$ORF @ 52576-53026” |
| | | CDS | 20892..21875 |
| | | | /product=“−> COG0177(5,222)[25.0] : |
| | | | A(18,33974,763,27)$zz$endonuclease-3 & KO:K10773” |
| 96 | 0212124_10005596 | CDS | complement(65..460) |
| | (Accession | | /product=“orf(37,241602,5456,0)$zz$ORF @ 64-460” |
| | 0212124_10005596) | | |
| | | CDS | 104..1741 |
| | | | /product=“orf(37,241602,5456,1)$zz$ORF @ 103-1741” |
| | | CDS | complement(217..441) |
| | | | /product=“orf(37,241602,5456,2)$zz$ORF @ 216-441” |
| | | CDS | complement(1001..1477) |
| | | | /product=“orf(37,241602,5456,3)$zz$ORF @ 1000-1477” |
| | | CDS | 1963..2205 |
| | | | /product=“orf(37,241602,5456,4)$zz$ORF @ 1962-2205” |
| | | CDS | complement(2269..2451) |
| | | | /product=“orf(37,241602,5456,5)$zz$ORF @ 2268-2451” |
| | | CDS | complement(2315..2503) |
| | | | /product=“orf(37,241602,5456,6)$zz$ORF @ 2314-2503” |
| | | CDS | 2588..5431 |
| | | | /product=“−> IscB(1,73)[26.6] \| IscB(350,447)[39.5] : |
| | | | orf(37,241602,5456,7)$zz$ORF @ 2587-5431” |
| | | CDS | 2588..5431 |
| | | | /product=“−> IscB(1,73)[26.6] \| IscB(350,447)[39.5] : |
| | | | orf(37,241602,5456,7)$zz$ORF @ 2587-5431” |
| | | CDS | complement(2608..2841) |
| | | | /product=“orf(37,241602,5456,8)$zz$ORF @ 2607-2841” |
| | | CDS | complement(2693..2908) |
| | | | /product=“orf(37,241602,5456,9)$zz$ORF @ 2692-2908” |
| | | CDS | complement(3218..4324) |
| | | | /product=“orf(37,241602,5456,10)$zz$ORF @ 3217-4324” |
| | | CDS | 3579..3782 |
| | | | /product=“orf(37,241602,5456,11)$zz$ORF @ 3578-3782” |
| | | CDS | complement(4317..4793) |
| | | | /product=“orf(37,241602,5456,12)$zz$ORF @ 4316-4793” |
| | | CDS | complement(5120..5449) |
| | | | /product=“orf(37,241602,5456,13)$zz$ORF @ 5119-5449” |
| | | DR | 5646..5672 |
| | | DR | 5710..5744 |
| | | DR | 5781..5816 |
| | | DR | 5852..5887 |
| | | DR | 5922..5957 |
| | | DR | 5992..6027 |
| | | DR | 6063..6098 |
| | | DR | 6134..6169 |
| | | CDS | complement(6608..6982) |
| | | | /product=“orf(37,241602,5456,14)$zz$ORF @ 6607-6982” |
| | | CDS | complement(6655..6930) |
| | | | /product=“orf(37,241602,5456,15)$zz$ORF @ 6654-6930” |
| | | CDS | 6929..7330 |
| | | | /product=“orf(37,241602,5456,16)$zz$ORF @ 6928-7330” |
| | | CDS | complement(7022..7852) |
| | | | /product=“orf(37,241602,5456,17)$zz$ORF @ 7021-7852” |
| | | CDS | complement(7123..7293) |
| | | | /product=“orf(37,241602,5456,18)$zz$ORF @ 7122-7293” |
| | | CDS | 7370..8041 |
| | | | /product=“orf(37,241602,5456,19)$zz$ORF @ 7369-8041” |
| | | CDS | 7464..7808 |
| | | | /product=“orf(37,241602,5456,20)$zz$ORF @ 7463-7808” |
| | | CDS | 8689..8856 |
| | | | /product=“orf(37,241602,5456,22)$zz$ORF @ 8688-8856” |
| 97 | 0315279_10007213 | CDS | 16..162 |
| | (Accession | | /product=“A(7,281630,7212,0)$zz$hypothetical protein” |
| | 0315279_10007213 | | |
| | | POI | 166..2967 |
| | | | /product=“−> IscB(338,439)[53.7] \| cas9(388,458)[31.0] \| |
| | | | KOON_cd09643(386,573)[29.2] \| TIGR01865(356,573)[30.4] \| |
| | | | pfam13395(394,441)[38.7] \| COG1403(351,464)[26.5] : |
| | | | A(7,281630,7212,1)$zz$5-methylcytosine-specific |
| | | | restriction endonuclease McrA & COG1403” |
| | | CDS | 166..2967 |
| | | | /product=“−> IscB(338,439)[53.7] \| cas9(388,458)[31.0] \| |
| | | | KOON_cd09643(386,573)[29.2] \| TIGR01865(356,573)[30.4] \| |
| | | | pfam13395(394,441)[38.7] \| COG1403(351,464)[26.5] : |
| | | | A(7,281630,7212,1)$zz$5-methylcytosine-specific |
| | | | restriction endonuclease McrA & COG1403” |
| | | CDS | complement(186..359) |
| | | | /product=“orf(7,281630,7212,1)$zz$ORF @ 185-359” |
| | | CDS | 729..938 |
| | | | /product=“orf(7,281630,7212,2)$zz$ORF @ 728-938” |
| | | CDS | complement(1312..1581) |
| | | | /product=“orf(7,281630,7212,3)$zz$ORF @ 1311-1581” |
| | | CDS | complement(2305..2766) |
| | | | /product=“orf(7,281630,7212,4)$zz$ORF @ 2304-2766” |
| | | DR | 3180..3215 |
| | | DR | 3251..3286 |
| | | DR | 3321..3356 |
| | | DR | 3391..3426 |
| | | DR | 3463..3498 |
| | | CDS | 3743..3988 |
| | | | /product=“A(7,281630,7212,2)$zz$hypothetical protein” |
| | | CDS | complement(4039..4269) |
| | | | /product=“orf(7,281630,7212,6)$zz$ORF @ 4038-4269” |
| | | CDS | 4077..4319 |
| | | | /product=“−> pfam01402(6,44)[23.6] \| COG0864(1,71)[39.4] |
| | | | :A(7,281630,7212,3)$zz$metal-responsive CopG/Arc/MetJ |
| | | | familytranscriptional regulator & COG0864” |
| | | CDS | 4388..4639 |
| | | | /product=“−> pfam02452(1,82)[57.3] \| COG2337(1,82)[43.6] |
| | | | :A(7,281630,7212,4)$zz$mRNA interferase MazF & KO:K07171” |
| | | CDS | 4678..5475 |
| | | | /product=“A(7,281630,7212,5)$zz$hypothetical protein” |
| | | CDS | complement(5428..5604) |
| | | | /product=“orf(7,281630,7212,9)$zz$ORF @ 5427-5604” |
| | | CDS | 5486..6493 |
| | | | /product=“−> pfam01136(86,329)[107.8] \| |
| | | | COG0826(1,327)[100.4] : A(7,281630,7212,6)$zz$putative |
| | | | protease & KO:K08303” |
| | | CDS | complement(5531..5722) |
| | | | /product=“orf(7,281630,7212,11)$zz$ORF @ 5530-5722” |
| | | CDS | complement(5924..6121) |
| | | | /product=“orf(7,281630,7212,12)$zz$ORF @ 5923-6121” |
| | | CDS | 6033..6227 |
| | | | /product=“orf(7,281630,7212,13)$zz$ORF @ 6032-6227” |
| | | CDS | complement(6118..6387) |
| | | | /product=“orf(7,281630,7212,14)$zz$ORF @ 6117-6387” |
| | | CDS | 6612..7814 |
| | | | /product=“−> pfam09825(15,117)[28.4] \| |
| | | | COG4285(11,263)[38.5] : A(7,281630,7212,7)$zz$glutamine |
| | | | amidotransferase-like uncharacterized protein & COG4285” |
| | | CDS | complement(6677..6856) |
| | | | /product=“orf(7,281630,7212,16)$zz$ORF @ 6676-6856” |
| | | CDS | 7222..7449 |
| | | | /product=“orf(7,281630,7212,17)$zz$ORF @ 7221-7449” |
| | | CDS | 7828..8616 |
| | | | /product=“−> pfam02665(57,256)[43.3] \| |
| | | | COG2181(9,251)[48.2] : A(7,281630,7212,8)$zz$nitrate |
| | | | reductase gamma subunit & COG2181” |
| | | CDS | complement(8506..8715) |
| | | | /product=“orf(7,281630,7212,19)$zz$ORF @ 8505-8715 |
| | | CDS | 8573..9928 |
| | | | /product=“−> pfam02754(334,422)[74.1] \| |
| | | | pfam02754(210,295)[47.4] \| pfam13183(49,138)[40.7] \| |
| | | | COG0247(43,449)[333.8] : |
| | | | A(7,281630,7212,9)$zz$heterodisulfide reductase subunit D |
| | | | & KO:K08264” |
| | | CDS | 8724..8900 |
| | | | /product=“orf(7,281630,7212,21)$zz$ORF @ 8723-8900” |
| | | CDS | complement(9428..9595) |
| | | | /product=“orf(7,281630,7212,22)$zz$ORF @ 9427-9595” |
| | | CDS | 10091..11116 |
| | | | /product=“−> pfam13379(38,273)[125.1] \| |
| | | | COG0715(14,331)[217.8] : A(7,281630,7212,10)$zz$NitT/TauT |
| | | | family transport system substrate-binding protein & |
| | | | KO:K02051” |
| | | CDS | complement(10417..10623) |
| | | | /product=“orf(7,281630,7212,24)$zz$ORF @ 10416-10623” |
| | | CDS | complement(10699..10896) |
| | | | /product=“orf(7,281630,7212,25)$zz$ORF @ 10698-10896” |
| | | CDS | 11244..11858 |
| | | | /product=“−> pfam00528(29,200)[85.8] \| |
| | | | COG0600(1,204)[242.0] : A(7,281630,7212,11)$zz$NitT/TauT |
| | | | family transport system permease protein & KO:K02050” |
| | | CDS | complement(11288..11632) |
| | | | /product=“orf(7,281630,7212,27)$zz$ORF @ 11287-11632” |
| | | CDS | complement(11634..11909) |
| | | | /product=“orf(7,281630,7212,28)$zz$ORF @ 11633-11909” |
| | | CDS | 11876..12631 |
| | | | /product=“−> pfam00005(24,164)[121.1] \| |
| | | | COG1116(2,251)[301.2] : A(7,281630,7212,12)$zz$NitT/TauT |
| | | | family transport system ATP-binding protein & KO:K02049” |
| | | CDS | complement(11893..12075) |
| | | | /product=“orf(7,281630,7212,30)$zz$ORF @ 11892-12075” |
| | | CDS | complement(12670..12861) |
| | | | /product=“orf(7,281630,7212,32)$zz$ORF @ 12669-12861” |
| 98 | 0315296_10021693 | CDS | 26..238 |
| | (Accession | | /product=“orf(7,281647,21692,0)$zz$Partial ORF @ 25-238” |
| | 0315296_10021693) | | |
| | | POI | 402..3263 |
| | | | /product=“−> IscB(3,68)[29.8] \| IscB(373,454)[40.9] \| |
| | | | pfam14239(1,136)[27.4] \| pfam13395(409,457)[26.7] : |
| | | | A(7,281647,21692,0)$zz$RRXRR protein/HNH endonuclease & |
| | | | pfam14239,pfam13395” |
| | | CDS | 402..3263 |
| | | | /product=“−> IscB(3,68)[29.8] \| IscB(373,454)[40.9] \| |
| | | | pfam14239(1,136)[27.4] \| pfam13395(409,457)[26.7] : |
| | | | A(7,281647,21692,0)$zz$RRXRR protein/HNH endonuclease & |
| | | | pfam14239,pfam13395” |
| | | CDS | complement(653..1000) |
| | | | /product=“orf(7,281647,21692,2)$zz$ORF @ 652-1000” |
| | | CDS | complement(1410..1673) |
| | | | /product=“orf(7,281647,21692,3)$zz$ORF @ 1409-1673” |
| | | DR | 3485..3511 |
| | | DR | 3555..3581 |
| | | CDS | complement(3686..4063) |
| | | | /product=“orf(7,281647,21692,4)$zz$ORF @ 3685-4063” |
| | | CDS | complement(3790..4107) |
| | | | /product=“orf(7,281647,21692,5)$zz$ORF @ 3789-4107” |
| | | CDS | 3809..3946 |
| | | | /product=“A(7,281647,21692,1)$zz$hypothetical protein” |
| | | CDS | 4019..4375 |
| | | | /product=“A(7,281647,21692,2)$zz$hypothetical protein” |
| | | CDS | complement(4332..4505) |
| | | | /product=“A(7,281647,21692,3)$zz$hypothetical protein” |
| 99 | a0209605_1001101 | CDS | 1..198 |
| | (Accession | | /product=“orf(11,21340,1100,0)$zz$Partial ORF @ 0-198” |
| | a0209605_1001101) | | |
| | | CDS | 2..307 |
| | | | /product=“orf(11,21340,1100,1)$zz$Partial ORF @ 1-307” |
| | | CDS | complement(2..436) |
| | | | /product=“A(11,21340,1100,0)$zz$transposase & KO:K07488” |
| | | CDS | 268..549 |
| | | | /product=“orf(11,21340,1100,3)$zz$ORF @ 267-549” |
| | | CDS | 724..2109 |
| | | | /product=“A(11,21340,1100,1)$zz$transcriptional regulator |
| | | | with PAS, ATPase and Fis domain & COG3829” |
| | | CDS | complement(730..915) |
| | | | /product=“orf(11,21340,1100,5)$zz$ORF @ 729-915” |
| | | CDS | complement(1119..1367) |
| | | | /product=“orf(11,21340,1100,6)$zz$ORF @ 1118-1367” |
| | | CDS | complement(2323..3555) |
| | | | /product=“A(11,21340,1100,2)$zz$CoA:oxalate |
| | | | CoA-transferase & KO:K18702” |
| | | CDS | 3155..3337 |
| | | | /product=“orf(11,21340,1100,8)$zz$ORF @ 3154-3337” |
| | | CDS | 3334..3585 |
| | | | /product=“orf(11,21340,1100,9)$zz$ORF @ 3333-3585” |
| | | CDS | complement(4060..4176) |
| | | | /product=“A(11,21340,1100,3)$zz$hypothetical protein” |
| | | CDS | 4381..5202 |
| | | | /product=“A(11,21340,1100,4)$zz$enoyl-CoA hydratase & |
| | | | KO:K01692” |
| | | CDS | complement(4725..5033) |
| | | | /product=“orf(11,21340,1100,11)$zz$ORF @ 4724-5033” |
| | | CDS | 5228..5365 |
| | | | /product=“A(11,21340,1100,5)$zz$hypothetical protein” |
| | | CDS | 5410..6996 |
| | | | /product=“A(11,21340,1100,6)$zz$sodium/proline symporter |
| | | | &KO:K11928” |
| | | CDS | 5568..5753 |
| | | | /product=“orf(11,21340,1100,13)$zz$ORF @ 5567-5753” |
| | | CDS | complement(5706..5873) |
| | | | /product=“orf(11,21340,1100,14)$zz$ORF @ 5705-5873” |
| | | CDS | complement(5886..6155) |
| | | | /product=“orf(11,21340,1100,15)$zz$ORF @ 5885-6155” |
| | | CDS | complement(6240..6470) |
| | | | /product=“orf(11,21340,1100,16)$zz$ORF @ 6239-6470” |
| | | CDS | complement(6985..7173) |
| | | | /product=“orf(11,21340,1100,17)$zz$ORF @ 6984-7173” |
| | | CDS | 7188..7382 |
| | | | /product=“orf(11,21340,1100,18)$zz$ORF @ 7187-7382” |
| | | CDS | complement(7646..8017) |
| | | | /product=“orf(11,21340,1100,19)$zz$ORF @ 7645-8017” |
| | | CDS | 7692..8381 |
| | | | /product=“A(11,21340,1100,7)$zz$integrase/recombinase |
| | | | XerD& KO:K04763” |
| | | CDS | complement(8304..8609) |
| | | | /product=“orf(11,21340,1100,21)$zz$ORF @ 8303-8609” |
| | | CDS | 8397..8624 |
| | | | /product=“A(11,21340,1100,8)$zz$hypothetical protein” |
| | | CDS | 8636..8884 |
| | | | /product=“A(11,21340,1100,9)$zz$hypothetical protein” |
| | | POI | 9364..12198 |
| | | | /product=“−> IscB(1,66)[30.5] \| IscB(349,453)[39.7] : |
| | | | A(11,21340,1100,10)$zz$RRXRR protein/HNH endonuclease & |
| | | | pfam14239,pfam13395” |
| | | CDS | 9364..12198 |
| | | | /product=“−> IscB(1,66)[30.5] \| IscB(349,453)[39.7] : |
| | | | A(11,21340,1100,10)$zz$RRXRR protein/HNH endonuclease & |
| | | | pfam14239,pfam13395” |
| | | CDS | complement(9995..10180) |
| | | | /product=“orf(11,21340,1100,25)$zz$ORF @ 9994-10180” |
| | | CDS | complement(10078..10254) |
| | | | /product=“orf(11,21340,1100,26)$zz$ORF @ 10077-10254” |
| | | CDS | 10478..10702 |
| | | | /product=“orf(11,21340,1100,27)$zz$ORF @ 10477-10702” |
| | | CDS | complement(11221..11481) |
| | | | /product=“orf(11,21340,1100,28)$zz$ORF @ 11220-11481” |
| | | CDS | complement(11608..11838) |
| | | | /product=“orf(11,21340,1100,29)$zz$ORF @ 11607-11838” |
| | | CDS | complement(12037..12219) |
| | | | /product=“orf(11,21340,1100,30)$zz$ORF @ 12036-12219” |
| | | DR | 12397..12432 |
| | | DR | 12467..12502 |
| | | DR | 12562..12597 |
| | | DR | 12632..12667 |
| | | DR | 12701..12736 |
| | | DR | 12771..12806 |
| | | DR | 12842..12877 |
| | | DR | 12912..12947 |
| | | CDS | complement(12919..13104) |
| | | | /product=“orf(11,21340,1100,31)$zz$ORF @ 12918-13104” |
| | | CDS | complement(13688..14137) |
| | | | /product=“orf(11,21340,1100,32)$zz$ORF @ 13687-14137” |
| | | CDS | 13703..14719 |
| | | | /product=“A(11,21340,1100,11)$zz$glyceraldehyde |
| | | | 3-phosphate dehydrogenase & KO:K00134” |
| | | CDS | complement(13852..14100) |
| | | | /product=“orf(11,21340,1100,34)$zz$ORF @ 13851-14100” |
| | | CDS | complement(14572..14808) |
| | | | /product=“orf(11,21340,1100,35)$zz$ORF @ 14571-14808” |
| | | CDS | 14720..15478 |
| | | | /product=“A(11,21340,1100,12)$zz$triosephosphate |
| | | | isomerase& KO:K01803” |
| | | CDS | complement(14819..15019) |
| | | | /product=“orf(11,21340,1100,37)$zz$ORF @ 14818-15019” |
| | | CDS | complement(15310..15963) |
| | | | /product=“orf(11,21340,1100,38)$zz$ORF @ 15309-15963” |
| | | CDS | 15499..15885 |
| | | | /product=“A(11,21340,1100,13)$zz$preprotein translocase |
| | | | subunit SecG & KO:K03075” |
| | | CDS | complement(15831..16052) |
| | | | /product=“orf(11,21340,1100,40)$zz$ORF @ 15830-16052” |
| | | CDS | complement(15956..16144) |
| | | | /product=“orf(11,21340,1100,41)$zz$ORF @ 15955-16144” |
| | | CDS | complement(16277..16459) |
| | | | /product=“orf(11,21340,1100,42)$zz$ORF @ 16276-16459” |
| | | CDS | complement(16297..16494) |
| | | | /product=“A(11,21340,1100,14)$zz$hypothetical protein” |
| | | CDS | 16399..16605 |
| | | | /product=“orf(11,21340,1100,44)$zz$ORF @ 16398-16605” |
| | | CDS | 16406..16585 |
| | | | /product=“orf(11,21340,1100,45)$zz$ORF @ 16405-16585” |
| | | CDS | complement(16500..17594) |
| | | | /product=“A(11,21340,1100,15)$zz$3-deoxy-D-manno-octuloson |
| | | | i c-acid transferase/heptosyltransferase-1 & |
| | | | KO:K02527,KO:K02841” |
| | | CDS | 16621..16821 |
| | | | /product=“orf(11,21340,1100,47)$zz$ORF @ 16620-16821” |
| | | CDS | 16773..17270 |
| | | | /product=“orf(11,21340,1100,48)$zz$ORF @ 16772-17270” |
| | | CDS | complement(17356..17718) |
| | | | /product=“orf(11,21340,1100,49)$zz$ORF @ 17355-17718” |
| | | CDS | 17451..17648 |
| | | | /product=“orf(11,21340,1100,50)$zz$ORF @ 17450-17648” |
| | | CDS | complement(17591..18151) |
| | | | /product=“A(11,21340,1100,16)$zz$D-glycero-D-manno-heptose |
| | | | 1,7-bisphosphate phosphatase & KO:K03273” |
| | | CDS | 17717..18160 |
| | | | /product=“orf(11,21340,1100,52)$zz$ORF @ 17716-18160” |
| | | CDS | complement(18148..19227) |
| | | | /product=“A(11,21340,1100,17)$zz$heptosyltransferase-2 & |
| | | | KO:K02843” |
| | | CDS | 18169..19242 |
| | | | /product=“orf(11,21340,1100,54)$zz$ORF @ 18168-19242” |
| | | CDS | 18224..18622 |
| | | | /product=“orf(11,21340,1100,55)$zz$ORF @ 18223-18622” |
| | | CDS | complement(18743..18976) |
| | | | /product=“orf(11,21340,1100,56)$zz$ORF @ 18742-18976” |
| | | CDS | complement(18831..19013) |
| | | | /product=“orf(11,21340,1100,57)$zz$ORF @ 18830-19013” |
| | | CDS | 19019..19234 |
| | | | /product=“orf(11,21340,1100,58)$zz$ORF @ 19018-19234” |
| | | CDS | complement(19221..20105) |
| | | | /product=“A(11,21340,1100,18)$zz$KDO2-lipid IV(A) |
| | | | lauroyltransferase & KO:K02517” |
| | | CDS | 19290..20057 |
| | | | /product=“orf(11,21340,1100,60)$zz$ORF @ 19289-20057” |
| | | CDS | 19429..19692 |
| | | | /product=“orf(11,21340,1100,61)$zz$ORF @ 19428-19692” |
| | | CDS | complement(20102..21208) |
| | | | /product=“A(11,21340,1100,19)$zz$tetraacyldisaccharide |
| | | | 4′-kinase & KO:K00912” |
| | | CDS | 20312..20497 |
| | | | /product=“orf(11,21340,1100,63)$zz$ORF @ 20311-20497” |
| | | CDS | 20463..20909 |
| | | | /product=“orf(11,21340,1100,64)$zz$ORF @ 20462-20909” |
| | | CDS | 20630..21412 |
| | | | /product=“orf(11,21340,1100,65)$zz$ORF @ 20629-21412” |
| | | CDS | 21177..21767 |
| | | | /product=“orf(11,21340,1100,66)$zz$ORF @ 21176-21767” |
| | | CDS | 21346..21633 |
| | | | /product=“orf(11,21340,1100,68)$zz$ORF @ 21345-21633” |
| | | CDS | 21661..21834 |
| | | | /product=“orf(11,21340,1100,69)$zz$ORF @ 21660-21834” |
| | | CDS | 21844..22128 |
| | | | /product=“orf(11,21340,1100,70)$zz$ORF @ 21843-22128” |
| 100 | a0209605_1001101 | CDS | 1..198 |
| | (Accessiona0209605_1001101) | | /product=“orf(11,21340,1100,0)$zz$Partial ORF @ 0-198” |
| | | CDS | 2..307 |
| | | | /product=“orf(11,21340,1100,1)$zz$Partial ORF @ 1-307” |
| | | CDS | complement(2..436) |
| | | | /product=“−> pfam12760(11,56)[36.3] : |
| | | | A(11,21340,1100,0)$zz$transposase & KO:K07488” |
| | | CDS | 268..549 |
| | | | /product=“orf(11,21340,1100,3)$zz$ORF @ 267-549” |
| | | CDS | 724..2109 |
| | | | /product=“−> pfam00158(150,318)[213.1] \| |
| | | | pfam08448(14,118)[27.9] \| COG3829(1,456)[452.1] : |
| | | | A(11,21340,1100,1)$zz$transcriptional regulator with PAS, |
| | | | ATPase and Fis domain & COG3829” |
| | | CDS | complement(730..915) |
| | | | /product=“orf(11,21340,1100,5)$zz$ORF @ 729-915” |
| | | CDS | complement(1119..1367) |
| | | | /product=“orf(11,21340,1100,6)$zz$ORF @ 1118-1367” |
| | | CDS | complement(2323..3555) |
| | | | /product=“−> pfam02515(20,387)[446.8] \| |
| | | | COG1804(10,410)[464.6] : A(11,21340,1100,2)$zz$CoA:oxalate |
| | | | CoA-transferase & KO:K18702” |
| | | CDS | 3155..3337 |
| | | | /product=“orf(11,21340,1100,8)$zz$ORF @ 3154-3337” |
| | | CDS | 3334..3585 |
| | | | /product=“orf(11,21340,1100,9)$zz$ORF @ 3333-3585” |
| | | CDS | complement(4060..4176) |
| | | | /product=“A(11,21340,1100,3)$zz$hypothetical protein” |
| | | CDS | 4381..5202 |
| | | | /product=“−> pfam00378(6,234)[125.3] \| |
| | | | COG1024(1,234)[162.7] : A(11,21340,1100,4)$zz$enoyl-CoA |
| | | | hydratase & KO:K01692” |
| | | CDS | complement(4725..5033) |
| | | | /product=“orf(11,21340,1100,11)$zz$ORF @ 4724-5033” |
| | | CDS | 5228..5365 |
| | | | /product=“A(11,21340,1100,5)$zz$hypothetical protein” |
| | | CDS | 5410..6996 |
| | | | /product=“−> pfam00474(44,448)[205.1] \| |
| | | | COG0591(12,508)[285.1] : |
| | | | A(11,21340,1100,6)$zz$sodium/proline symporter & |
| | | | KO:K11928” |
| | | CDS | 5568..5753 |
| | | | /product=“orf(11,21340,1100,13)$zz$ORF @ 5567-5753” |
| | | CDS | complement(5706..5873) |
| | | | /product=“orf(11,21340,1100,14)$zz$ORF @ 5705-5873” |
| | | CDS | complement(5886..6155) |
| | | | /product=“orf(11,21340,1100,15)$zz$ORF @ 5885-6155” |
| | | CDS | complement(6240..6470) |
| | | | /product=“orf(11,21340,1100,16)$zz$ORF @ 6239-6470” |
| | | CDS | complement(6985..7173) |
| | | | /product=“orf(11,21340,1100,17)$zz$ORF @ 6984-7173” |
| | | CDS | 7188..7382 |
| | | | /product=“orf(11,21340,1100,18)$zz$ORF @ 7187-7382” |
| | | CDS | complement(7646..8017) |
| | | | /product=“orf(11,21340,1100,19)$zz$ORF @ 7645-8017” |
| | | CDS | 7692..8381 |
| | | | /product=“−> pfam00589(45,218)[91.9] \| |
| | | | COG4974(14,228)[107.1] : |
| | | | A(11,21340,1100,7)$zz$integrase/recombinase XerD & |
| | | | KO:K04763” |
| | | CDS | complement(8304..8609) |
| | | | /product=“orf(11,21340,1100,21)$zz$ORF @ 8303-8609” |
| | | CDS | 8397..8624 |
| | | | /product=“A(11,21340,1100,8)$zz$hypothetical protein” |
| | | CDS | 8636..8884 |
| | | | /product=“A(11,21340,1100,9)$zz$hypothetical protein” |
| | | POI | 9364..12198 |
| | | | /product=“−> IscB(1,66)[30.5] \| IscB(349,453)[39.7] \| |
| | | | pfam14239(1,92)[32.3] \| pfam13395(405,452)[22.1] : |
| | | | A(11,21340,1100,10)$zz$RRXRR protein/HNH endonuclease & |
| | | | pfam14239,pfam13395” |
| | | CDS | 9364..12198 |
| | | | /product=“−> IscB(1,66)[30.5] \| IscB(349,453)[39.7] \| |
| | | | pfam14239(1,92)[32.3] \| pfam13395(405,452)[22.1] : |
| | | | A(11,21340,1100,10)$zz$RRXRR protein/HNH endonuclease & |
| | | | pfam14239,pfam13395” |
| | | CDS | complement(9995..10180) |
| | | | /product=“orf(11,21340,1100,25)$zz$ORF @ 9994-10180” |
| | | CDS | complement(10078..10254) |
| | | | /product=“orf(11,21340,1100,26)$zz$ORF @ 10077-10254” |
| | | CDS | 10478..10702 |
| | | | /product=“orf(11,21340,1100,27)$zz$ORF @ 10477-10702” |
| | | CDS | complement(11221..11481) |
| | | | /product=“orf(11,21340,1100,28)$zz$ORF @ 11220-11481” |
| | | CDS | complement(11608..11838) |
| | | | /product=“orf(11,21340,1100,29)$zz$ORF @ 11607-11838” |
| | | CDS | complement(12037..12219) |
| | | | /product=“orf(11,21340,1100,30)$zz$ORF @ 12036-12219” |
| | | DR | 12397..12432 |
| | | DR | 12467..12502 |
| | | DR | 12562..12597 |
| | | DR | 12632..12667 |
| | | DR | 12701..12736 |
| | | DR | 12771..12806 |
| | | DR | 12842..12877 |
| | | DR | 12912..12947 |
| | | CDS | complement(12919..13104) |
| | | | /product=“orf(11,21340,1100,31)$zz$ORF @ 12918-13104” |
| | | CDS | complement(13688..14137) |
| | | | /product=“orf(11,21340,1100,32)$zz$ORF @ 13687-14137” |
| | | CDS | 13703..14719 |
| | | | /product=“−> pfam02800(158,314)[217.9] \| |
| | | | pfam00044(3,104)[116.0] \| COG0057(2,336)[439.4] : |
| | | | A(11,21340,1100,11)$zz$glyceraldehyde 3-phosphate |
| | | | dehydrogenase & KO:K00134” |
| | | CDS | complement(13852..14100) |
| | | | /product=“orf(11,21340,1100,34)$zz$ORF @ 13851-14100” |
| | | CDS | complement(14572..14808) |
| | | | /product=“orf(11,21340,1100,35)$zz$ORF @ 14571-14808” |
| | | CDS | 14720..15478 |
| | | | /product=“−> pfam00121(4,247)[309.0] \| |
| | | | COG0149(1,250)[303.4] : |
| | | | A(11,21340,1100,12)$zz$triosephosphate isomerase & |
| | | | KO:K01803” |
| | | CDS | complement(14819..15019) |
| | | | /product=“orf(11,21340,1100,37)$zz$ORF @ 14818-15019” |
| | | CDS | complement(15310..15963) |
| | | | /product=“orf(11,21340,1100,38)$zz$ORF @ 15309-15963” |
| | | CDS | 15499..15885 |
| | | | /product=“−> pfam03840(4,72)[77.1] \| COG1314(1,93)[77.3] |
| | | | :A(11,21340,1100,13)$zz$preprotein translocase subunit |
| | | | SecG& KO:K03075” |
| | | CDS | complement(15831..16052) |
| | | | /product=“orf(11,21340,1100,40)$zz$ORF @ 15830-16052” |
| | | CDS | complement(15956..16144) |
| | | | /product=“orf(11,21340,1100,41)$zz$ORF @ 15955-16144” |
| | | CDS | complement(16277..16459) |
| | | | /product=“orf(11,21340,1100,42)$zz$ORF @ 16276-16459” |
| | | CDS | complement(16297..16494) |
| | | | /product=“−> pfam03966(4,43)[29.8] \| COG2835(3,60)[66.2] |
| | | | :A(11,21340,1100,14)$zz$hypothetical protein” |
| | | CDS | 16399..16605 |
| | | | /product=“orf(11,21340,1100,44)$zz$ORF @ 16398-16605” |
| | | CDS | 16406..16585 |
| | | | /product=“orf(11,21340,1100,45)$zz$ORF @ 16405-16585” |
| | | CDS | complement(16500..17594) |
| | | | /product=“−> pfam01075(79,325)[177.5] \| |
| | | | COG0859(1,343)[268.6] : |
| | | | A(11,21340,1100,15)$zz$3-deoxy-D-manno-octulosonic-acid |
| | | | transferase/heptosyltransferase-1 & KO:K02527,KO:K02841” |
| | | CDS | 16621..16821 |
| | | | /product=“orf(11,21340,1100,47)$zz$ORF @ 16620-16821” |
| | | CDS | 16773..17270 |
| | | | /product=“orf(11,21340,1100,48)$zz$ORF @ 16772-17270” |
| | | CDS | complement(17356..17718) |
| | | | /product=“orf(11,21340,1100,49)$zz$ORF @ 17355-17718” |
| | | CDS | 17451..17648 |
| | | | /product=“orf(11,21340,1100,50)$zz$ORF @ 17450-17648” |
| | | CDS | complement(17591..18151) |
| | | | /product=“−> pfam13242(107,181)[50.9] \| |
| | | | COG0241(1,182)[163.6] : |
| | | | A(11,21340,1100,16)$zz$D-glycero-D-manno-heptose |
| | | | 1,7-bisphosphate phosphatase & KO:K03273” |
| | | CDS | 17717..18160 |
| | | | /product=“orf(11,21340,1100,52)$zz$ORF @ 17716-18160” |
| | | CDS | complement(18148..19227) |
| | | | /product=“−> pfam01075(84,332)[168.0] \| |
| | | | COG0859(16,355)[250.7] : |
| | | | A(11,21340,1100,17)$zz$heptosyltransferase-2 & KO:K02843” |
| | | CDS | 18169..19242 |
| | | | /product=“orf(11,21340,1100,54)$zz$ORF @ 18168-19242” |
| | | CDS | 18224..18622 |
| | | | /product=“orf(11,21340,1100,55)$zz$ORF @ 18223-18622” |
| | | CDS | complement(18743..18976) |
| | | | /product=“orf(11,21340,1100,56)$zz$ORF @ 18742-18976” |
| | | CDS | complement(18831..19013) |
| | | | /product=“orf(11,21340,1100,57)$zz$ORF @ 18830-19013” |
| | | CDS | 19019..19234 |
| | | | /product=“orf(11,21340,1100,58)$zz$ORF @ 19018-19234” |
| | | CDS | complement(19221..20105) |
| | | | /product=“−> pfam03279(6,286)[176.5] \| |
| | | | COG1560(2,294)[222.3] : A(11,21340,1100,18)$zz$KDO2-lipid |
| | | | IV(A) lauroyltransferase & KO:K02517”' |
| | | CDS | 19290..20057 |
| | | | /product=“orf(11,21340,1100,60)$zz$ORF @ 19289-20057” |
| | | CDS | 19429..19692 |
| | | | /product=“orf(11,21340,1100,61)$zz$ORF @ 19428-19692” |
| | | CDS | complement(20102..21208) |
| | | | /product=“−> pfam02606(27,366)[311.5] \| |
| | | | COG1663(20,366)[268.2] : |
| | | | A(11,21340,1100,19)$zz$tetraacyldisaccharide 4′-kinase & |
| | | | KO:K00912” |
| | | CDS | 20312..20497 |
| | | | /product=“orf(11,21340,1100,63)$zz$ORF @ 20311-20497” |
| | | CDS | 20463..20909 |
| | | | /product=“orf(11,21340,1100,64)$zz$ORF @ 20462-20909” |
| | | CDS | 20630..21412 |
| | | | /product=“orf(11,21340,1100,65)$zz$ORF @ 20629-21412” |
| | | CDS | 21177..21767 |
| | | | /product=“orf(11,21340,1100,66)$zz$ORF @ 21176-21767” |
| | | CDS | 21346..21633 |
| | | | /product=“orf(11,21340,1100,68)$zz$ORF @ 21345-21633” |
| | | CDS | 21661..21834 |
| | | | /product=“orf(11,21340,1100,69)$zz$ORF @ 21660-21834” |
| | | CDS | 21844..22128 |
| | | | /product=“orf(11,21340,1100,70)$zz$ORF @ 21843-22128” |
| 101 | PMZF01000021.1 | CDS | 399..587 |
| | (Accession | | /product=“orf(28,161430,67,3)$zz$ORF @ 1185-1374” |
| | PMZF01000021) | | |
| | | CDS | complement(643..912) |
| | | | /product=“orf(28,161430,67,4)$zz$ORF @ 1429-1699” |
| | | CDS | complement(998..1846) |
| | | | /product=“orf(28,161430,67,5)$zz$ORF @ 1784-2633” |
| | | CDS | 1127..1840 |
| | | | /product=“orf(28,161430,67,6)$zz$ORF @ 1913-2627” |
| | | CDS | complement(1311..1718) |
| | | | /product=“orf(28,161430,67,7)$zz$ORF @ 2097-2505” |
| | | CDS | 1425..1640 |
| | | | /product=“orf(28,161430,67,8)$zz$ORF @ 2211-2427” |
| | | CDS | complement(1618..2391) |
| | | | /product=“orf(28,161430,67,9)$zz$ORF @ 2404-3178” |
| | | CDS | 1717..2079 |
| | | | /product=“orf(28,161430,67,10)$zz$ORF @ 2503-2866” |
| | | CDS | complement(1800..1973) |
| | | | /product=“orf(28,161430,67,11)$zz$ORF @ 2586-2760” |
| | | CDS | 2176..2496 |
| | | | /product=“orf(28,161430,67,12)$zz$ORF @ 2962-3283” |
| | | CDS | complement(2210..2446) |
| | | | /product=“orf(28,161430,67,13)$zz$ORF @ 2996-3233” |
| | | CDS | complement(2539..3519) |
| | | | /product=“orf(28,161430,67,14)$zz$ORF @ 3325-4306” |
| | | CDS | 2615..2842 |
| | | | /product=“orf(28,161430,67,15)$zz$ORF @ 3401-3629” |
| | | CDS | 2776..3300 |
| | | | /product=“orf(28,161430,67,16)$zz$ORF @ 3562-4087” |
| | | CDS | complement(2829..3272) |
| | | | /product=“orf(28,161430,67,17)$zz$ORF @ 3615-4059” |
| | | CDS | 3009..3263 |
| | | | /product=“orf(28,161430,67,18)$zz$ORF @ 3795-4050” |
| | | CDS | 3314..3499 |
| | | | /product=“orf(28,161430,67,19)$zz$ORF @ 4100-4286” |
| | | CDS | complement(3327..3497) |
| | | | /product=“orf(28,161430,67,20)$zz$ORF @ 4113-4284” |
| | | CDS | 3358..4194 |
| | | | /product=“orf(28,161430,67,21)$zz$ORF @ 4144-4981” |
| | | CDS | complement(3544..4236) |
| | | | /product=“orf(28,161430,67,22)$zz$ORF @ 4330-5023” |
| | | CDS | 3548..3715 |
| | | | /product=“orf(28,161430,67,23)$zz$ORF @ 4334-4502” |
| | | CDS | 4204..4638 |
| | | | /product=“orf(28,161430,67,24)$zz$ORF @ 4990-5425” |
| | | CDS | complement(4243..4575) |
| | | | /product=“orf(28,161430,67,25)$zz$ORF @ 5029-5362” |
| | | CDS | complement(4493..6499) |
| | | | /product=“orf(28,161430,67,26)$zz$ORF @ 5279-7286” |
| | | CDS | 4556..4753 |
| | | | /product=“orf(28,161430,67,27)$zz$ORF @ 5342-5540” |
| | | CDS | 4683..5237 |
| | | | /product=“orf(28,161430,67,28)$zz$ORF @ 5469-6024” |
| | | CDS | 4835..5905 |
| | | | /product=“orf(28,161430,67,29)$zz$ORF @ 5621-6692” |
| | | CDS | complement(5169..5882) |
| | | | /product=“orf(28,161430,67,30)$zz$ORF @ 5955-6669” |
| | | CDS | complement(5985..6185) |
| | | | /product=“orf(28,161430,67,31)$zz$ORF @ 6771-6972” |
| | | CDS | 5987..6544 |
| | | | /product=“orf(28,161430,67,32)$zz$ORF @ 6773-7331” |
| | | CDS | 6532..6807 |
| | | | /product=“orf(28,161430,67,33)$zz$ORF @ 7318-7594” |
| | | CDS | complement(6541..6963) |
| | | | /product=“orf(28,161430,67,34)$zz$ORF @ 7327-7750” |
| | | CDS | complement(6638..7174) |
| | | | /product=“orf(28,161430,67,35)$zz$ORF @ 7424-7961” |
| | | CDS | 6782..7261 |
| | | | /product=“orf(28,161430,67,36)$zz$ORF @ 7568-8048” |
| | | CDS | 7186..9426 |
| | | | /product=“orf(28,161430,67,37)$zz$ORF @ 7972-10213” |
| | | CDS | complement(7233..7685) |
| | | | /product=“orf(28,161430,67,38)$zz$ORF @ 8019-8472” |
| | | CDS | 7596..8087 |
| | | | /product=“orf(28,161430,67,39)$zz$ORF @ 8382-8874” |
| | | CDS | complement(7732..8091) |
| | | | /product=“orf(28,161430,67,40)$zz$ORF @ 8518-8878” |
| | | CDS | complement(8027..8380) |
| | | | /product=“orf(28,161430,67,41)$zz$ORF @ 8813-9167” |
| | | CDS | complement(8119..8301) |
| | | | /product=“orf(28,161430,67,42)$zz$ORF @ 8905-9088” |
| | | CDS | 8618..8869 |
| | | | /product=“orf(28,161430,67,43)$zz$ORF @ 9404-9656” |
| | | CDS | complement(8727..9086) |
| | | | /product=“orf(28,161430,67,44)$zz$ORF @ 9513-9873” |
| | | CDS | 9444..10040 |
| | | | /product=“orf(28,161430,67,45)$zz$ORF @ 10230-10827” |
| | | POI | 10001..12841 |
| | | | /product=“−> IscB(349,452)[41.8] : |
| | | | orf(28,161430,67,46)$zz$ORF @ 10787-13628” |
| | | CDS | 10001..12841 |
| | | | /product=“−> IscB(349,452)[41.8] : |
| | | | orf(28,161430,67,46)$zz$ORF @ 10787-13628” |
| | | CDS | complement(10021..10254) |
| | | | /product=“orf(28,161430,67,47)$zz$ORF @ 10807-11041” |
| | | CDS | complement(10106..10321) |
| | | | /product=“orf(28,161430,67,48)$zz$ORF @ 10892-11108” |
| | | CDS | complement(10631..11260) |
| | | | /product=“orf(28,161430,67,49)$zz$ORF @ 11417-12047” |
| | | CDS | 11212..11829 |
| | | | /product=“orf(28,161430,67,50)$zz$ORF @ 11998-12616” |
| | | CDS | complement(11727..12203) |
| | | | /product=“orf(28,161430,67,51)$zz$ORF @ 12513-12990” |
| | | CDS | complement(11813..12121) |
| | | | /product=“orf(28,161430,67,52)$zz$ORF @ 12599-12908” |
| | | CDS | complement(12278..12859) |
| | | | /product=“orf(28,161430,67,53)$zz$ORF @ 13064-13646” |
| | | DR | 13048..13084 |
| | | DR | 13122..13158 |
| | | DR | 13192..13228 |
| | | DR | 13263..13299 |
| | | CDS | 13285..13551 |
| | | | /product=“orf(28,161430,67,54)$zz$ORF @ 14071-14338” |
| | | DR | 13333..13369 |
| | | CDS | 13397..13621 |
| | | | /product=“orf(28,161430,67,55)$zz$ORF @ 14183-14408” |
| | | CDS | 13780..14436 |
| | | | /product=“orf(28,161430,67,56)$zz$ORF @ 14566-15223” |
| | | CDS | complement(14125..14430) |
| | | | /product=“orf(28,161430,67,57)$zz$ORF @ 14911-15217” |
| | | CDS | complement(14168..15562) |
| | | | /product=“orf(28,161430,67,58)$zz$ORF @ 14954-16349” |
| | | CDS | 14198..15550 |
| | | | /product=“orf(28,161430,67,59)$zz$ORF @ 14984-16337” |
| | | CDS | 14770..15834 |
| | | | /product=“orf(28,161430,67,60)$zz$ORF @ 15556-16621” |
| | | CDS | complement(15178..15405) |
| | | | /product=“orf(28,161430,67,61)$zz$ORF @ 15964-16192” |
| | | CDS | 15555..16733 |
| | | | /product=“orf(28,161430,67,62)$zz$ORF @ 16341-17520” |
| | | CDS | complement(15779..15961) |
| | | | /product=“orf(28,161430,67,63)$zz$ORF @ 16565-16748” |
| | | CDS | complement(16149..16376) |
| | | | /product=“orf(28,161430,67,64)$zz$ORF @ 16935-17163” |
| | | CDS | 16312..16512 |
| | | | /product=“orf(28,161430,67,65)$zz$ORF @ 17098-17299” |
| | | CDS | 16367..17077 |
| | | | /product=“orf(28,161430,67,66)$zz$ORF @ 17153-17864” |
| | | CDS | complement(16743..16946) |
| | | | /product=“orf(28,161430,67,67)$zz$ORF @ 17529-17733” |
| | | CDS | complement(16814..17788) |
| | | | /product=“orf(28,161430,67,68)$zz$ORF @ 17600-18575” |
| | | CDS | 17634..18008 |
| | | | /product=“orf(28,161430,67,69)$zz$ORF @ 18420-18795” |
| | | CDS | complement(17891..18061) |
| | | | /product=“orf(28,161430,67,70)$zz$ORF @ 18677-18848” |
| | | CDS | complement(18058..18384) |
| | | | /product=“orf(28,161430,67,71)$zz$ORF @ 18844-19171” |
| | | CDS | 18312..18710 |
| | | | /product=“orf(28,161430,67,72)$zz$ORF @ 19098-19497” |
| | | CDS | 18422..18601 |
| | | | /product=“orf(28,161430,67,73)$zz$ORF @ 19208-19388” |
| | | CDS | complement(18547..19263) |
| | | | /product=“orf(28,161430,67,74)$zz$ORF @ 19333-20050” |
| | | CDS | 18562..19308 |
| | | | /product=“orf(28,161430,67,75)$zz$Partial ORF @ |
| | | | 19348-20095” |
| | | CDS | 18692..18910 |
| | | | /product=“orf(28,161430,67,76)$zz$ORF @ 19478-19697” |
| 102 | 0172371_10038057 | CDS | 19..201 |
| | (Accession | | /product=“orf(16,31096,38056,15)$zz$Partial ORF @ |
| | 0172371_10038057) | | 5079-5262” |
| | | CDS | 580..837 |
| | | | /product=“A(16,31096,38056,3)$zz$integration host factor |
| | | | subunit beta & KO:K05788” |
| | | CDS | complement(855..1022) |
| | | | /product=“orf(16,31096,38056,13)$zz$ORF @ 4258-4426” |
| | | CDS | 874..1530 |
| | | | /product=“A(16,31096,38056,2)$zz$hypothetical protein & |
| | | | Hypo-rule applied” |
| | | CDS | complement(1150..1332) |
| | | | /product=“orf(16,31096,38056,12)$zz$ORF @ 3948-4131” |
| | | CDS | complement(1182..1403) |
| | | | /product=“orf(16,31096,38056,11)$zz$ORF @ 3877-4099” |
| | | CDS | complement(1652..1849) |
| | | | /product=“orf(16,31096,38056,8)$zz$ORF @ 3431-3629” |
| | | CDS | complement(1656..1844) |
| | | | /product=“orf(16,31096,38056,9)$zz$ORF @ 3436-3625” |
| | | CDS | 1719..1877 |
| | | | /product=“A(16,31096,38056,1)$zz$hypothetical protein & |
| | | | Hypo-rule applied” |
| | | POI | 2014..4872 |
| | | | /product=“−> IscB(1,165)[29.7] \| IscB(344,443)[44.9] : |
| | | | A(16,31096,38056,0)$zz$RRXRR protein & pfam14239” |
| | | CDS | 2014..4872 |
| | | | /product=“−> IscB(1,165)[29.7] \| IscB(344,443)[44.9] : |
| | | | A(16,31096,38056,0)$zz$RRXRR protein & pfam14239” |
| | | CDS | complement(2874..3047) |
| | | | /product=“orf(16,31096,38056,7)$zz$ORF @ 2233-2407” |
| | | CDS | 3113..3358 |
| | | | /product=“orf(16,31096,38056,6)$zz$ORF @ 1922-2168” |
| | | CDS | complement(3241..3438) |
| | | | /product=“orf(16,31096,38056,5)$zz$ORF @ 1842-2040” |
| | | CDS | 3740..3946 |
| | | | /product=“orf(16,31096,38056,4)$zz$ORF @ 1334-1541” |
| | | CDS | complement(4328..4504) |
| | | | /product=“orf(16,31096,38056,3)$zz$ORF @ 776-953” |
| | | CDS | 4668..4862 |
| | | | /product=“orf(16,31096,38056,2)$zz$ORF @ 418-613” |
| | | DR | 5068..5095 |
| | | DR | 5068..5096 |
| | | CDS | complement(5098..5280) |
| | | | /product=“orf(16,31096,38056,0)$zz$Partial ORF @ 0-183” |
| | | DR | 5138..5165 |
| | | DR | 5138..5166 |
| 103 | 0299912_10028469 | CDS | complement(3..209) |
| | (Accession | | /product=“orf(4,280876,28468,0)$zz$Partial ORF @ 2-209” |
| | 0299912_10028469) | | |
| | | CDS | 131..301 |
| | | | /product=“orf(4,280876,28468,1)$zz$ORF @ 130-301” |
| | | CDS | 361..1368 |
| | | | /product=“A(4,280876,28468,0)$zz$hypothetical protein” |
| | | CDS | complement(401..742) |
| | | | /product=“orf(4,280876,28468,3)$zz$ORF @ 400-742” |
| | | CDS | complement(462..707) |
| | | | /product=“orf(4,280876,28468,4)$zz$ORF @ 461-707” |
| | | CDS | complement(1029..1211) |
| | | | /product=“orf(4,280876,28468,5)$zz$ORF @ 1028-1211” |
| | | CDS | 1390..2379 |
| | | | /product=“orf(4,280876,28468,6)$zz$ORF @ 1389-2379” |
| | | CDS | 2471..2674 |
| | | | /product=“orf(4,280876,28468,7)$zz$ORF @ 2470-2674” |
| | | CDS | 2575..2754 |
| | | | /product=“A(4,280876,28468,2)$zz$hypothetical protein” |
| | | CDS | 2771..2908 |
| | | | /product=“A(4,280876,28468,3)$zz$hypothetical protein” |
| | | POI | 2983..4839 |
| | | | /product=“−> IscB(11,181)[32.0] \| IscB(384,460)[31.6] \| |
| | | | pfam14239(2,167)[29.0] \| pfam13395(420,468)[24.0] : |
| | | | A(4,280876,28468,4)$zz$RRXRR protein/HNH endonuclease & |
| | | | pfam14239,pfam13395” |
| | | CDS | 2983..4839 |
| | | | /product=“−> IscB(11,181)[32.0] \| IscB(384,460)[31.6] \| |
| | | | pfam14239(2,167)[29.0] \| pfam13395(420,468)[24.0] : |
| | | | A(4,280876,28468,4)$zz$RRXRR protein/HNH endonuclease & |
| | | | pfam14239,pfam13395” |
| | | CDS | complement(3135..3602) |
| | | | /product=“orf(4,280876,28468,10)$zz$ORF @ 3134-3602” |
| | | CDS | complement(3424..3717) |
| | | | /product=“orf(4,280876,28468,11)$zz$ORF @ 3423-3717” |
| | | CDS | 3563.3790 |
| | | | /product=“orf(4,280876,28468,12)$zz$ORF @ 3562-3790” |
| | | CDS | complement(3805..4287) |
| | | | /product=“orf(4,280876,28468,13)$zz$ORF @ 3804-4287” |
| | | CDS | complement(4396..4839) |
| | | | /product=“orf(4,280876,28468,14)$zz$Partial ORF @ |
| | | | 4395-4839” |
| 104 | 0180436_10000059 | CDS | 172..354 |
| | (Accession | | /product=“orf(18,35201,58,49)$zz$ORF @ 12749-12932” |
| | 0180436_10000059) | | |
| | | CDS | complement(428..628) |
| | | | /product=“orf(18,35201,58,47)$zz$ORF @ 12475-12676” |
| | | DR | 697..712 |
| | | CDS | complement(727..1020) |
| | | | /product=“orf(18,35201,58,45)$zz$ORF @ 12083-12377” |
| | | DR | 742..757 |
| | | CDS | 908..1183 |
| | | | /product=“orf(18,35201,58,44)$zz$ORF @ 11920-12196” |
| | | CDS | complement(917..4624) |
| | | | /product=“−> pfam02837(107,289)[69.5] \| |
| | | | pfam00703(291,392)[33.1] \| COG3250(97,571)[138.9] : |
| | | | A(18,35201,58,6)$zz$Beta-galactosidase/beta-glucuronidase |
| | | | & COG3250” |
| | | CDS | complement(972..1949) |
| | | | /product=“orf(18,35201,58,41)$zz$ORF @ 11154-12132” |
| | | CDS | 1250..1624 |
| | | | /product=“orf(18,35201,58,43)$zz$ORF @ 11479-11854” |
| | | CDS | complement(1621..1854) |
| | | | /product=“orf(18,35201,58,42)$zz$ORF @ 11249-11483” |
| | | CDS | 1931..2104 |
| | | | /product=“orf(18,35201,58,40)$zz$ORF @ 10999-11173” |
| | | CDS | 2222..2854 |
| | | | /product=“orf(18,35201,58,38)$zz$ORF @ 10249-10882” |
| | | CDS | complement(2226..2888) |
| | | | /product=“orf(18,35201,58,37)$zz$ORF @ 10215-10878” |
| | | CDS | complement(2350..2673) |
| | | | /product=“orf(18,35201,58,39)$zz$ORF @ 10430-10754” |
| | | CDS | 3104..3313 |
| | | | /product=“orf(18,35201,58,36)$zz$ORF @ 9790-10000” |
| | | CDS | complement(3274..3489) |
| | | | /product=“orf(18,35201,58,35)$zz$ORF @ 9614-9830” |
| | | CDS | complement(3411..3707) |
| | | | /product=“orf(18,35201,58,34)$zz$ORF @ 9396-9693” |
| | | CDS | 3524..4552 |
| | | | /product=“orf(18,35201,58,32)$zz$ORF @ 8551-9580” |
| | | CDS | 4132..4299 |
| | | | /product=“orf(18,35201,58,33)$zz$ORF @ 8804-8972” |
| | | CDS | complement(4605..4913) |
| | | | /product=“−> pfam13936(3,36)[28.6] : |
| | | | A(18,35201,58,5)$zz$Helix-turn-helix domain-containing |
| | | | protein & pfam13936” |
| | | CDS | 4958..5158 |
| | | | /product=“orf(18,35201,58,29)$zz$ORF @ 7945-8146” |
| | | CDS | 5155..5334 |
| | | | /product=“orf(18,35201,58,28)$zz$ORF @ 7769-7949” |
| | | CDS | 5316..5519 |
| | | | /product=“A(18,35201,58,4)$zz$hypothetical protein & |
| | | | Hypo-rule applied” |
| | | CDS | complement(5582..7768) |
| | | | /product=“−> pfam00400(601,639)[39.0] \| |
| | | | pfam00400(558,594)[38.1] \| pfam00400(512,549)[37.5] \| |
| | | | pfam00400(277,313)[31.3] \| pfam00400(468,504)[30.7] \| |
| | | | pfam00400(647,690)[29.2] \| pfam00400(320,358)[28.9] \| |
| | | | pfam00400(368,423)[15.8] \| COG2319(467,700)[143.5] \| |
| | | | COG2319(266,436)[57.9] : A(18,35201,58,3)$zz$WD40 |
| | | | repeat/WD40 repeat & COG2319,COG2319” |
| | | CDS | 5804..6457 |
| | | | /product=“orf(18,35201,58,26)$zz$ORF @ 6646-7300” |
| | | CDS | complement(6072..6740) |
| | | | /product=“orf(18,35201,58,25)$zz$ORF @ 6363-7032” |
| | | CDS | 6384..6782 |
| | | | /product=“orf(18,35201,58,24)$zz$ORF @ 6321-6720” |
| | | CDS | 6551..7756 |
| | | | /product=“orf(18,35201,58,22)$zz$ORF @ 5347-6553” |
| | | CDS | complement(6754..6933) |
| | | | /product=“orf(18,35201,58,23)$zz$ORF @ 6170-6350” |
| | | CDS | complement(7590..8030) |
| | | | /product=“orf(18,35201,58,19)$zz$ORF @ 5073-5514” |
| | | CDS | complement(7624..8025) |
| | | | /product=“orf(18,35201,58,20)$zz$ORF @ 5078-5480” |
| | | CDS | 7651..8880 |
| | | | /product=“−> pfam04542(21,89)[44.3] \| |
| | | | COG1595(4,128)[63.0]: orf(18,35201,58,18)$zz$ORF @ |
| | | | 4223-5453” |
| | | CDS | 8576..8962 |
| | | | /product=“orf(18,35201,58,16)$zz$ORF @ 4141-4528” |
| | | CDS | complement(8724..8912) |
| | | | /product=“orf(18,35201,58,17)$zz$ORF @ 4191-4380” |
| | | CDS | complement(8999..9193) |
| | | | /product=“orf(18,35201,58,15)$zz$ORF @ 3910-4105” |
| | | CDS | complement(9067..9258) |
| | | | /product=“orf(18,35201,58,14)$zz$ORF @ 3845-4037” |
| | | DR | 9202..9238 |
| | | DR | 9275..9311 |
| | | DR | 9347..9383 |
| | | DR | 9418..9454 |
| | | DR | 9489..9525 |
| | | DR | 9559..9595 |
| | | DR | 9632..9668 |
| | | DR | 9701..9737 |
| | | CDS | complement(9704..10063) |
| | | | /product=“orf(18,35201,58,13)$zz$ORF @ 3040-3400” |
| | | DR | 9775..9811 |
| | | CDS | complement(9778..10092) |
| | | | /product=“orf(18,35201,58,12)$zz$ORF @ 3011-3326” |
| | | POI | 10001..12841 |
| | | | /product=“−> IscB(351,453)[44.8] \| |
| | | | pfam13395(407,452)[29.2] \| COG1403(363,466)[27.4] : |
| | | | A(18,35201,58,1)$zz$5-methylcytosine-specific restriction |
| | | | endonuclease McrA & COG1403” |
| | | CDS | 10001..12841 |
| | | | /product=“−> IscB(351,453)[44.8] \| |
| | | | pfam13395(407,452)[29.2] \| COG1403(363,466)[27.4] : |
| | | | A(18,35201,58,1)$zz$5-methylcytosine-specific restriction |
| | | | endonuclease McrA & COG1403” |
| | | CDS | 10062..10406 |
| | | | /product=“orf(18,35201,58,10)$zz$ORF @ 2697-3042” |
| | | CDS | 10126..10362 |
| | | | /product=“orf(18,35201,58,11)$zz$ORF @ 2741-2978” |
| | | CDS | complement(10409..11431) |
| | | | /product=“orf(18,35201,58,8)$zz$ORF @ 1672-2695” |
| | | CDS | 10605..10844 |
| | | | /product=“orf(18,35201,58,9)$zz$ORF @ 2259-2499” |
| | | CDS | complement(11628..11816) |
| | | | /product=“orf(18,35201,58,7)$zz$ORF @ 1287-1476” |
| | | CDS | 11730..11939 |
| | | | /product=“orf(18,35201,58,6)$zz$ORF @ 1164-1374” |
| | | CDS | complement(11753..12100) |
| | | | /product=“orf(18,35201,58,5)$zz$ORF @ 1003-1351” |
| | | CDS | complement(11920..12315) |
| | | | /product=“orf(18,35201,58,3)$zz$ORF @ 788-1184” |
| | | CDS | 12009..12191 |
| | | | /product=“orf(18,35201,58,4)$zz$ORF @ 912-1095” |
| | | CDS | 12372..12542 |
| | | | /product=“orf(18,35201,58,2)$zz$ORF @ 561-732” |
| | | CDS | 12882..13103 |
| | | | /product=“orf(18,35201,58,0)$zz$Partial ORF @ 0-222” |
| | | CDS | complement(12996..13103) |
| | | | /product=“A(18,35201,58,0)$zz$hypothetical protein & |
| | | | Hypo-rule applied” |
| 105 | 0214473_10118860 | CDS | complement(3..554) |
| | (Accession | | /product=“orf(4,280878,118859,9)$zz$Partial ORF @ |
| | 0214473_10118860) | | 2532-3084” |
| | | CDS | 3..206 |
| | | | /product=“orf(4,280878,118859,12)$zz$Partial ORF @ |
| | | | 2880-3084” |
| | | CDS | 22..231 |
| | | | /product=“orf(4,280878,118859,11)$zz$Partial ORF @ |
| | | | 2855-3065” |
| | | CDS | 231..425 |
| | | | /product=“orf(4,280878,118859, 10)$zz$ORF @ 2661-2856” |
| | | CDS | complement(350..697) |
| | | | /product=“orf(4,280878,118859,8)$zz$ORF @ 2389-2737” |
| | | DR | 739..775 |
| | | DR | 809..845 |
| | | CDS | 839..1036 |
| | | | /product=“orf(4,280878,118859,7)$zz$ORF @ 2050-2248” |
| | | DR | 881..917 |
| | | DR | 950..986 |
| | | DR | 1021..1057 |
| | | DR | 1092..1128 |
| | | DR | 1164..1200 |
| | | DR | 1235..1271 |
| | | POI | 1466..3085 |
| | | | /product=“−> IscB(1,158)[25.2] \| IscB(349,449)[49.7] : |
| | | | A(4,280878,118859,0)$zz$hypothetical protein” |
| | | CDS | 1466..3085 |
| | | | /product=“−> IscB(1,158)[25.2] \| IscB(349,449)[49.7] : |
| | | | A(4,280878,118859,0)$zz$hypothetical protein” |
| | | CDS | complement(1874..2812) |
| | | | /product=“orf(4,280878,118859,4)$zz$ORF @ 274-1213” |
| | | CDS | 1995..2303 |
| | | | /product=“orf(4,280878,118859,6)$zz$ORF @ 783-1092” |
| | | CDS | complement(2374..2550) |
| | | | /product=“orf(4,280878,118859,5)$zz$ORF @ 536-713” |
| | | CDS | 2586..3086 |
| | | | /product=“orf(4,280878,118859,0)$zz$Partial ORF @ 0-501” |
| | | CDS | complement(2683..2859) |
| | | | /product=“orf(4,280878,118859,3)$zz$ORF @ 227-404” |
| | | CDS | complement(2763..3065) |
| | | | /product=“orf(4,280878,118859,2)$zz$Partial ORF @ 21-324” |
| 106 | PVMK01116787.1 | CDS | complement(2..196) |
| | (Accession | | /product=“orf(7,14485,8884,0)$zz$Partial ORF @ 1-196” |
| | PVMK01116787) | | |
| | | CDS | complement(193..879) |
| | | | /product=“orf(7,14485,8884,1)$zz$ORF @ 192-879” |
| | | CDS | 355..594 |
| | | | /product=“orf(7,14485,8884,2)$zz$ORF @ 354-594” |
| | | CDS | 715..921 |
| | | | /product=“orf(7,14485,8884,3)$zz$ORF @ 714-921” |
| | | CDS | complement(918..1217) |
| | | | /product=“orf(7,14485,8884,4)$zz$ORF @ 917-1217” |
| | | POI | 1583..4441 |
| | | | /product=“−> IscB(1,64)[28.8] \| IscB(351,451)[46.3] : |
| | | | orf(7,14485,8884,5)$zz$ORF @ 1582-4441” |
| | | CDS | 1583..4441 |
| | | | /product=“−> IscB(1,64)[28.8] \| IscB(351,451)[46.3] : |
| | | | orf(7,14485,8884,5)$zz$ORF @ 1582-4441” |
| | | CDS | complement(1846..2436) |
| | | | /product=“orf(7,14485,8884,6)$zz$ORF @ 1845-2436” |
| | | CDS | 2394..2624 |
| | | | /product=“orf(7,14485,8884,7)$zz$ORF @ 2393-2624” |
| | | DR | 4616..4640 |
| | | DR | 4688..4712 |
| | | DR | 4759..4783 |
| | | DR | 4830..4854 |
| | | DR | 4901..4925 |
| | | CDS | complement(5063..5683) |
| | | | /product=“orf(7,14485,8884,8)$zz$ORF @ 5062-5683” |
| | | CDS | 5172..5402 |
| | | | /product=“orf(7,14485,8884,9)$zz$ORF @ 5171-5402” |
| | | CDS | 5460..5879 |
| | | | /product=“orf(7,14485,8884, 10)$zz$ORF @ 5459-5879” |
| | | CDS | complement(5935..6219) |
| | | | /product=“orf(7,14485,8884,11)$zz$ORF @ 5934-6219” |
| | | CDS | 5939..6169 |
| | | | /product=“orf(7,14485,8884,12)$zz$ORF @ 5938-6169” |
| | | CDS | 6325..6708 |
| | | | /product=“orf(7,14485,8884,13)$zz$ORF @ 6324-6708” |
| 107 | 0315281_10101262 | POI | 368..3223 |
| | (Accession | | /product=“−> IscB(1,67)[31.2] \| IscB(371,446)[37.0] \| |
| | 0315281_10101262) | | pfam14239(1,84)[27.2] \| pfam13395(407,455)[23.4] : |
| | | | A(7,281632,101261,0)$zz$RRXRR protein/HNH endonuclease & |
| | | | pfam14239,pfam13395” |
| | | CDS | 368..3223 |
| | | | /product=“−> IscB(1,67)[31.2] \| IscB(371,446)[37.0] \| |
| | | | pfam14239(1,84)[27.2] \| pfam13395(407,455)[23.4] : |
| | | | A(7,281632,101261,0)$zz$RRXRR protein/HNH endonuclease & |
| | | | pfam14239,pfam13395” |
| | | CDS | 909..1127 |
| | | | /product=“orf(7,281632, 101261,7)$zz$ORF @ 2213-2432” |
| | | CDS | complement(961..1209) |
| | | | /product=“orf(7,281632,101261,6)$zz$ORF @ 2131-2380” |
| | | CDS | complement(1334..1525) |
| | | | /product=“orf(7,281632,101261,5)$zz$ORF @ 1815-2007” |
| | | CDS | complement(1488..1763) |
| | | | /product=“orf(7,281632,101261,4)$zz$ORF @ 1577-1853” |
| | | CDS | complement(1775..2107) |
| | | | /product=“orf(7,281632,101261,3)$zz$ORF @ 1233-1566” |
| | | CDS | 2436..2603 |
| | | | /product=“orf(7,281632,101261,2)$zz$ORF @ 737-905” |
| | | CDS | complement(3159..3338) |
| | | | /product=“orf(7,281632,101261,0)$zz$Partial ORF @ 2-182” |
| 108 | 0187854_10007072 | CDS | complement(213..452) |
| | (Accession | | /product=“orf(16,30420,7071,18)$zz$ORF @ 7194-7434” |
| | 0187854_10007072) | | |
| | | CDS | complement(571..1173) |
| | | | /product=“orf(16,30420,7071,15)$zz$ORF @ 6473-7076” |
| | | CDS | 863..1165 |
| | | | /product=“orf(16,30420,7071,16)$zz$ORF @ 6481-6784” |
| | | CDS | complement(1002..1226) |
| | | | /product=“orf(16,30420,7071,14)$zz$ORF @ 6420-6645” |
| | | CDS | 1677..1787 |
| | | | /product=“A(16,30420,7071,3)$zz$hypothetical protein & |
| | | | Hypo-rule applied” |
| | | DR | 1772..1806 |
| | | DR | 1842..1876 |
| | | DR | 1912..1946 |
| | | CDS | complement(1915..2124) |
| | | | /product=“orf(16,30420,7071,13)$zz$ORF @ 5522-5732” |
| | | DR | 1983..2017 |
| | | DR | 2054..2088 |
| | | DR | 2125..2159 |
| | | DR | 2199..2233 |
| | | DR | 2270..2304 |
| | | CDS | 2384..2707 |
| | | | /product=“orf(16,30420,7071,12)$zz$ORF @ 4939-5263” |
| | | POI | 2425..5391 |
| | | | /product=“−> IscB(26,189)[31.7] \| IscB(374,475)[45.9] \| |
| | | | pfam14239(18,212)[34.3] : A(16,30420,7071,2)$zz$RRXRR |
| | | | protein & pfam14239” |
| | | CDS | 2425..5391 |
| | | | /product=“−> IscB(26,189)[31.7] \| IscB(374,475)[45.9] \| |
| | | | pfam14239(18,212)[34.3] : A(16,30420,7071,2)$zz$RRXRR |
| | | | protein & pfam14239” |
| | | CDS | 2795..2998 |
| | | | /product=“orf(16,30420,7071,11)$zz$ORF @ 4648-4852” |
| | | CDS | complement(3181..4086) |
| | | | /product=“orf(16,30420,7071,9)$zz$ORF @ 3560-4466” |
| | | CDS | complement(3375..3584) |
| | | | /product=“orf(16,30420,7071,10)$zz$ORF @ 4062-4272” |
| | | CDS | complement(4120..4596) |
| | | | /product=“orf(16,30420,7071,7)$zz$ORF @ 3050-3527” |
| | | CDS | complement(4215..4385) |
| | | | /product=“orf(16,30420,7071,8)$zz$ORF @ 3261-3432” |
| | | CDS | complement(4416..4652) |
| | | | /product=“orf(16,30420,7071,6)$zz$ORF @ 2994-3231” |
| | | CDS | 5897..6166 |
| | | | /product=“A(16,30420,7071,1)$zz$hypothetical protein & |
| | | | Hypo-rule applied” |
| | | CDS | complement(6193..7644) |
| | | | /product=“−> pfam02449(1,155)[31.5] : |
| | | | A(16,30420,7071,0)$zz$Beta-galactosidase & pfam02449” |
| | | CDS | complement(6196..7644) |
| | | | /product=“−> pfam02449(1,155)[31.5] : |
| | | | orf(16,30420,7071,0)$zz$Partial ORF @ 2-1451” |
| | | CDS | 6199..6621 |
| | | | /product=“orf(16,30420,7071,3)$zz$ORF @ 1025-1448” |
| | | CDS | 6653..6847 |
| | | | /product=“orf(16,30420,7071,2)$zz$ORF @ 799-994” |
| | | CDS | complement(7415..7630) |
| | | | /product=“orf(16,30420,7071,1)$zz$Partial ORF @ 16-232” |
| 109 | 0311301_10009134 | CDS | complement(1..228) |
| | (Accession | | /product=“orf(4,280981,9133,0)$zz$Partial ORF @ 0-228” |
| | 0311301_10009134) | | |
| | | CDS | 2..847 |
| | | | /product=“−> pfam03781(1,244)[125.8] \| |
| | | | COG1262(1,245)[153.1] : orf(4,280981,9133,1)$zz$Partial |
| | | | ORF @ 1-847” |
| | | CDS | complement(2..760) |
| | | | /product=“orf(4,280981,9133,2)$zz$Partial ORF @ 1-760” |
| | | CDS | 104..850 |
| | | | /product=“−> pfam03781(1,244)[125.8] \| |
| | | | COG1262(1,245)[153.1] : |
| | | | A(4,280981,9133,0)$zz$formylglycine-generating enzyme |
| | | | required for sulfatase activity & COG1262” |
| | | CDS | 400..573 |
| | | | /product=“orf(4,280981,9133,3)$zz$ORF @ 399-573” |
| | | CDS | complement(523..708) |
| | | | /product=“orf(4,280981,9133,4)$zz$ORF @ 522-708” |
| | | CDS | 595..999 |
| | | | /product=“orf(4,280981,9133,5)$zz$ORF @ 594-999” |
| | | CDS | 1002..1439 |
| | | | /product=“A(4,280981,9133,1)$zz$hypothetical protein” |
| | | CDS | complement(1121..1297) |
| | | | /product=“orf(4,280981,9133,7)$zz$ORF @ 1120-1297” |
| | | CDS | 1147..1467 |
| | | | /product=“orf(4,280981,9133,8)$zz$ORF @ 1146-1467” |
| | | CDS | complement(1425..1826) |
| | | | /product=“orf(4,280981,9133,9)$zz$ORF @ 1424-1826” |
| | | CDS | 1480..2184 |
| | | | /product=“orf(4,280981,9133,10)$zz$ORF @ 1479-2184” |
| | | CDS | complement(1558..1752) |
| | | | /product=“orf(4,280981,9133,11)$zz$ORF @ 1557-1752” |
| | | CDS | 1934..2116 |
| | | | /product=“orf(4,280981,9133,12)$zz$ORF @ 1933-2116” |
| | | CDS | complement(2064..2273) |
| | | | /product=“orf(4,280981,9133,13)$zz$ORF @ 2063-2273” |
| | | CDS | complement(2197..3054) |
| | | | /product=“A(4,280981,9133,3)$zz$hypothetical protein” |
| | | CDS | 2333..2524 |
| | | | /product=“orf(4,280981,9133,15)$zz$ORF @ 2332-2524” |
| | | CDS | 2620..3090 |
| | | | /product=“orf(4,280981,9133,16)$zz$ORF @ 2619-3090” |
| | | CDS | 2978..3250 |
| | | | /product=“orf(4,280981,9133,17)$zz$ORF @ 2977-3250” |
| | | CDS | complement(3067..3936) |
| | | | /product=“−> pfam16872(181,259)[94.1] : |
| | | | A(4,280981,9133,4)$zz$putative phage abortive infection |
| | | | protein & pfam16872” |
| | | CDS | complement(3741..3944) |
| | | | /product=“orf(4,280981,9133,19)$zz$ORF @ 3740-3944” |
| | | CDS | 3802..4029 |
| | | | /product=“orf(4,280981,9133,20)$zz$ORF @ 3801-4029” |
| | | CDS | 3836..4189 |
| | | | /product=“orf(4,280981,9133,21)$zz$ORF @ 3835-4189” |
| | | CDS | complement(3997..4245) |
| | | | /product=“orf(4,280981,9133,22)$zz$ORF @ 3996-4245” |
| | | CDS | 4287..4454 |
| | | | /product=“orf(4,280981,9133,23)$zz$ORF @ 4286-4454” |
| | | DR | 4316..4348 |
| | | DR | 4385..4421 |
| | | CDS | complement(4412..4780) |
| | | | /product=“orf(4,280981,9133,24)$zz$ORF @ 4411-4780” |
| | | DR | 4455..4491 |
| | | CDS | 4525..4719 |
| | | | /product=“orf(4,280981,9133,25)$zz$ORF @ 4524-4719” |
| | | DR | 4527..4563 |
| | | DR | 4599..4635 |
| | | CDS | complement(4602..4871) |
| | | | /product=“orf(4,280981,9133,26)$zz$ORF @ 4601-4871” |
| | | CDS | complement(4744..5376) |
| | | | /product=“orf(4,280981,9133,27)$zz$ORF @ 4743-5376” |
| | | POI | 4816..7641 |
| | | | /product=“−> IscB(4,162)[31.8] \| IscB(350,450)[42.6] \| |
| | | | pfam13395(406,452)[25.0] \| COG1403(375,463)[31.5] : |
| | | | A(4,280981,9133,5)$zz$5-methylcytosine-specific |
| | | | restriction endonuclease McrA & COG1403” |
| | | CDS | 4816..7641 |
| | | | /product=“−> IscB(4,162)[31.8] \| IscB(350,450)[42.6] \| |
| | | | pfam13395(406,452)[25.0] \| COG1403(375,463)[31.5] : |
| | | | A(4,280981,9133,5)$zz$5-methylcytosine-specific |
| | | | restriction endonuclease McrA & COG1403” |
| | | CDS | complement(5078..5380) |
| | | | /product=“orf(4,280981,9133,29)$zz$ORF @ 5077-5380” |
| | | CDS | complement(5569..6255) |
| | | | /product=“orf(4,280981,9133,30)$zz$ORF @ 5568-6255” |
| | | CDS | complement(5961..6182) |
| | | | /product=“orf(4,280981,9133,31)$zz$ORF @ 5960-6182” |
| | | CDS | complement(6370..6792) |
| | | | /product=“orf(4,280981,9133,32)$zz$ORF @ 6369-6792” |
| | | CDS | complement(6534..7151) |
| | | | /product=“orf(4,280981,9133,33)$zz$ORF @ 6533-7151” |
| | | CDS | 6545..6754 |
| | | | /product=“orf(4,280981,9133,34)$zz$ORF @ 6544-6754” |
| | | CDS | complement(6761..6970) |
| | | | /product=“orf(4,280981,9133,35)$zz$ORF @ 6760-6970” |
| | | CDS | complement(6925..7614) |
| | | | /product=“orf(4,280981,9133,36)$zz$ORF @ 6924-7614” |
| | | CDS | complement(7359..7601) |
| | | | /product=“orf(4,280981,9133,37)$zz$ORF @ 7358-7601” |
| | | CDS | complement(7547..7768) |
| | | | /product=“orf(4,280981,9133,38)$zz$ORF @ 7546-7768” |
| | | CDS | 7696..7899 |
| | | | /product=“orf(4,280981,9133,40)$zz$ORF @ 7695-7899” |
| | | CDS | 7725..8039 |
| | | | /product=“−> pfam12728(50,97)[33.7] : |
| | | | A(4,280981,9133,6)$zz$helix-turn-helix protein & |
| | | | pfam12728” |
| | | CDS | complement(7859..8050) |
| | | | /product=“orf(4,280981,9133,41)$zz$ORF @ 7858-8050” |
| | | CDS | complement(8175..9314) |
| | | | /product=“A(4,280981,9133,7)$zz$hypothetical protein” |
| | | CDS | 8247..8579 |
| | | | /product=“orf(4,280981,9133,43)$zz$ORF @ 8246-8579” |
| | | CDS | 8359..8598 |
| | | | /product=“orf(4,280981,9133,44)$zz$ORF @ 8358-8598” |
| | | CDS | 8613..9854 |
| | | | /product=“orf(4,280981,9133,45)$zz$ORF @ 8612-9854” |
| | | CDS | complement(8780..9463) |
| | | | /product=“orf(4,280981,9133,46)$zz$ORF @ 8779-9463” |
| | | CDS | 9689..9898 |
| | | | /product=“A(4,280981,9133,8)$zz$hypothetical protein” |
| | | CDS | complement(9931..10683) |
| | | | /product=“orf(4,280981,9133,48)$zz$ORF @ 9930-10683” |
| | | CDS | complement(10104..10898) |
| | | | /product=“−> pfam01641(72,173)[95.0] \| |
| | | | COG0229(65,173)[92.8] : A(4,280981,9133,9)$zz$peptide |
| | | | methionine sulfoxide reductase MsrB & COG0229” |
| | | CDS | 10648..10989 |
| | | | /product=“orf(4,280981,9133,50)$zz$ORF @ 10647-10989” |
| | | CDS | complement(10720..10941) |
| | | | /product=“orf(4,280981,9133,51)$zz$ORF @ 10719-10941” |
| | | CDS | 11136..11342 |
| | | | /product=“orf(4,280981,9133,52)$zz$ORF @ 11135-11342” |
| | | CDS | complement(11239..11553) |
| | | | /product=“orf(4,280981,9133,53)$zz$ORF @ 11238-11553” |
| | | CDS | 11468..11635 |
| | | | /product=“orf(4,280981,9133,54)$zz$ORF @ 11467-11635” |
| | | CDS | 11651..12034 |
| | | | /product=“−> pfam01627(32,120)[43.2] \| |
| | | | COG2198(9,123)[45.1] : A(4,280981,9133,10)$zz$HPt |
| | | | (histidine-containing phosphotransfer) domain-containing |
| | | | protein & COG2198” |
| | | CDS | 12072..12434 |
| | | | /product=“orf(4,280981,9133,56)$zz$ORF @ 12071-12434” |
| | | CDS | complement(12106..12402) |
| | | | /product=“orf(4,280981,9133,57)$zz$ORF @ 12105-12402” |
| | | CDS | 12109..13206 |
| | | | /product=“−> pfam01266(6,356)[140.1] \| |
| | | | COG0665(1,361)[101.1] : |
| | | | A(4,280981,9133,11)$zz$D-amino-acid oxidase & KO:K00273” |
| | | CDS | complement(12502..13110) |
| | | | /product=“orf(4,280981,9133,59)$zz$ORF @ 12501-13110” |
| | | CDS | complement(12579..12779) |
| | | | /product=“orf(4,280981,9133,60)$zz$ORF @ 12578-12779” |
| | | CDS | 12630..12887 |
| | | | /product=“orf(4,280981,9133,61)$zz$ORF @ 12629-12887” |
| | | CDS | complement(13334..14062) |
| | | | /product=“−> pfam05685(12,181)[111.3] \| |
| | | | COG4636(1,185)[109.0] : orf(4,280981,9133,62)$zz$ORF @ |
| | | | 13333-14062” |
| | | CDS | 13668..14042 |
| | | | /product=“orf(4,280981,9133,63)$zz$ORF @ 13667-14042” |
| | | CDS | complement(14014..16020) |
| | | | /product=“orf(4,280981,9133,64)$zz$ORF @ 14013-16020” |
| | | CDS | 14071..14313 |
| | | | /product=“orf(4,280981,9133,65)$zz$ORF @ 14070-14313” |
| | | CDS | 14132..14335 |
| | | | /product=“orf(4,280981,9133,66)$zz$ORF @ 14131-14335” |
| | | CDS | complement(14196..14372) |
| | | | /product=“orf(4,280981,9133,67)$zz$ORF @ 14195-14372” |
| | | CDS | 14310..14726 |
| | | | /product=“orf(4,280981,9133,68)$zz$ORF @ 14309-14726” |
| | | CDS | complement(14388..14705) |
| | | | /product=“orf(4,280981,9133,69)$zz$ORF @ 14387-14705” |
| | | CDS | 15788..16015 |
| | | | /product=“orf(4,280981,9133,71)$zz$ORF @ 15787-16015” |
| | | CDS | complement(16183..16818) |
| | | | /product=“orf(4,280981,9133,72)$zz$ORF @ 16182-16818” |
| | | CDS | complement(16424..16642) |
| | | | /product=“orf(4,280981,9133,73)$zz$ORF @ 16423-16642” |
| | | CDS | 16574..16780 |
| | | | /product=“orf(4,280981,9133,74)$zz$ORF @ 16573-16780” |
| | | CDS | complement(16590..16832) |
| | | | /product=“orf(4,280981,9133,75)$zz$ORF @ 16589-16832” |
| 110 | a0184636_1002691 | CDS | complement(1..186) |
| | (Accession | | /product=“−> pfam13437(4,62)[27.6] : |
| | a0184636_1002691) | | A(18,34054,2690,0)$zz$hemolysin D & KO:K11003” |
| | | POI | 370..3234 |
| | | | /product=“−> IscB(3,171)[29.5] \| IscB(375,450)[29.1] \| |
| | | | pfam14239(1,149)[26.3] \| pfam13395(410,458)[22.9] : |
| | | | A(18,34054,2690,1)$zz$RRXRR protein/HNH endonuclease & |
| | | | pfam14239,pfam13395” |
| | | CDS | 370..3234 |
| | | | /product=“−> IscB(3,171)[29.5] \| IscB(375,450)[29.1] \| |
| | | | pfam14239(1,149)[26.3] \| pfam13395(410,458)[22.9] : |
| | | | A(18,34054,2690,1)$zz$RRXRR protein/HNH endonuclease & |
| | | | pfam14239,pfam13395” |
| | | CDS | complement(654..827) |
| | | | /product=“orf(18,34054,2690,2)$zz$ORF @ 653-827” |
| | | CDS | complement(1312..1644) |
| | | | /product=“orf(18,34054,2690,3)$zz$ORF @ 1311-1644” |
| | | CDS | 1778..2137 |
| | | | /product=“orf(18,34054,2690,4)$zz$ORF @ 1777-2137” |
| | | CDS | complement(2182..2355) |
| | | | /product=“orf(18,34054,2690,5)$zz$ORF @ 2181-2355” |
| | | DR | 3436..3472 |
| | | DR | 3508..3544 |
| | | DR | 3579..3615 |
| | | DR | 3650..3686 |
| | | DR | 3721..3757 |
| | | CDS | 4164..4481 |
| | | | /product=“A(18,34054,2690,2)$zz$hypothetical protein & |
| | | | Hypo-rule applied” |
| | | CDS | complement(4178..4513) |
| | | | /product=“orf(18,34054,2690,7)$zz$ORF @ 4177-4513” |
| | | CDS | 4512..4688 |
| | | | /product=“orf(18,34054,2690,9)$zz$Partial ORF @ 4511-4688” |
| 111 | 0315268_10069040 | CDS | complement(1..111) |
| | (Accession | | /product=“A(0,279979,69039,0)$zz$hypothetical protein” |
| | 0315268_10069040) | | |
| | | CDS | complement(92..364) |
| | | | /product=“orf(0,279979,69039,0)$zz$ORF @ 91-364” |
| | | CDS | complement(162..851) |
| | | | /product=“A(0,279979,69039,1)$zz$hypothetical protein” |
| | | CDS | 474..821 |
| | | | /product=“orf(0,279979,69039,2)$zz$ORF @ 473-821” |
| | | DR | 676..695 |
| | | CDS | 883..1398 |
| | | | /product=“orf(0,279979,69039,3)$zz$ORF @ 882-1398” |
| | | CDS | complement(892..1329) |
| | | | /product=“A(0,279979,69039,2)$zz$hypothetical protein” |
| | | CDS | 1274..1453 |
| | | | /product=“orf(0,279979,69039,5)$zz$ORF @ 1273-1453” |
| | | CDS | complement(1563..1868) |
| | | | /product=“orf(0,279979,69039,6)$zz$ORF @ 1562-1868” |
| | | POI | 1638..3332 |
| | | | /product=“−> IscB(4,65)[30.2] \| IscB(355,449)[41.3] \| |
| | | | pfam14239(2,121)[29.7] \| pfam13395(411,459)[24.8] : |
| | | | A(0,279979,69039,3)$zz$RRXRR protein/HNH endonuclease & |
| | | | pfam14239,pfam13395” |
| | | CDS | complement(1748..2134) |
| | | | /product=“orf(0,279979,69039,8)$zz$ORF @ 1747-2134” |
| | | CDS | 1867..2064 |
| | | | /product=“orf(0,279979,69039,9)$zz$ORF @ 1866-2064” |
| | | CDS | 2218..2403 |
| | | | /product=“orf(0,279979,69039,10)$zz$ORF @ 2217-2403” |
| | | CDS | complement(3021..3311) |
| | | | /product=“orf(0,279979,69039,11)$zz$Partial ORF @ |
| | | | 3020-3311” |
| | | CDS | complement(3065..3313) |
| | | | /product=“orf(0,279979,69039,12)$zz$Partial ORF @ |
| | | | 3064-3313” |
| 112 | 0315284_10088943 | CDS | 2..259 |
| | (Accession | | /product=“−> pfam00171(1,82)[90.4] \| COG1012(1,85)[94.9] |
| | 0315284_10088943) | | :A(7,281635,88942,3)$zz$succinate-semialdehydedehydrogenase/ glutarate- |
| | | | semialdehyde dehydrogenase &KO:K00135” |
| | | CDS | 2..256 |
| | | | /product=“−> pfam00171(1,82)[90.4] \| COG1012(1,85)[94.9] |
| | | | :orf(7,281635,88942,11)$zz$Partial ORF @ 3901-4156” |
| | | CDS | 343..756 |
| | | | /product=“−> pfam01909(2,102)[41.6] \| |
| | | | COG1708(1,134)[40.0]: A(7,281635,88942,2)$zz$hypothetical |
| | | | protein” |
| | | CDS | 740..1171 |
| | | | /product=“−> pfam01934(7,135)[41.2] \| |
| | | | COG2445(4,142)[53.9]: |
| | | | A(7,281635,88942,1)$zz$uncharacterized protein |
| | | | YutE(UPF0331/DUF86 family) & COG2445” |
| | | CDS | complement(805..1050) |
| | | | /product=“orf(7,281635,88942,9)$zz$ORF @ 3107-3353” |
| | | CDS | complement(983..1204) |
| | | | /product=“orf(7,281635,88942,8)$zz$ORF @ 2953-3175” |
| | | POI | 1326..4157 |
| | | | /product=“−> IscB(1,61)[31.8] \| IscB(347,451)[49.3] \| |
| | | | cas9(401,456)[25.0] \| KOON_cd09643(375,584)[29.9] \| |
| | | | TIGR01865(372,584)[29.3] \| pfam13395(405,452)[35.0] \| |
| | | | pfam14239(1,77)[29.9] \| COG1403(339,475)[25.7] : |
| | | | A(7,281635,88942,0)$zz$5-methylcytosine-specific |
| | | | restriction endonuclease McrA & COG1403” |
| | | CDS | 1326..4157 |
| | | | /product=“−> IscB(1,61)[31.8] \| IscB(347,451)[49.3] \| |
| | | | cas9(401,456)[25.0] \| KOON_cd09643(375,584)[29.9] \| |
| | | | TIGR01865(372,584)[29.3] \| pfam13395(405,452)[35.0] \| |
| | | | pfam14239(1,77)[29.9] \| COG1403(339,475)[25.7] : |
| | | | A(7,281635,88942,0)$zz$5-methylcytosine-specific |
| | | | restriction endonuclease McrA & COG1403” |
| | | CDS | complement(1346..1576) |
| | | | /product=“orf(7,281635,88942,7)$zz$ORF @ 2581-2812” |
| | | CDS | complement(1515..1733) |
| | | | /product=“orf(7,281635,88942,6)$zz$ORF @ 2424-2643” |
| | | CDS | 2440..2625 |
| | | | /product=“orf(7,281635,88942,5)$zz$ORF @ 1532-1718” |
| | | CDS | complement(2505..2774) |
| | | | /product=“orf(7,281635,88942,4)$zz$ORF @ 1383-1653” |
| | | CDS | complement(2931..3440) |
| | | | /product=“orf(7,281635,88942,2)$zz$ORF @ 717-1227” |
| | | CDS | complement(3002..3301) |
| | | | /product=“orf(7,281635,88942,3)$zz$ORF @ 856-1156” |
| | | CDS | complement(3498..3959) |
| | | | /product=“orf(7,281635,88942,1)$zz$ORF @ 198-660” |
| 113 | 0172371_10009355 | CDS | 3..443 |
| | (Accession | | /product=“orf(16,31096,9354,49)$zz$Partial ORF @ |
| | 0172371_10009355) | | 13048-13489” |
| | | CDS | 151..1239 |
| | | | /product=“A(16,31096,9354,14)$zz$Multimeric flavodoxin |
| | | | WrbA/Putative sterol carrier protein & COG0655,COG3255” |
| | | CDS | complement(750..941) |
| | | | /product=“orf(16,31096,9354,48)$zz$ORF @ 12550-12742” |
| | | CDS | complement(990..1208) |
| | | | /product=“orf(16,31096,9354,47)$zz$ORF @ 12283-12502” |
| | | CDS | 1572..1841 |
| | | | /product=“A(16,31096,9354,13)$zz$hypothetical protein & |
| | | | Hypo-rule applied” |
| | | CDS | complement(1784..2530) |
| | | | /product=“orf(16,31096,9354,43)$zz$ORF @ 10961-11708” |
| | | CDS | complement(1861..2040) |
| | | | /product=“orf(16,31096,9354,44)$zz$ORF @ 11451-11631” |
| | | CDS | 1871..3454 |
| | | | /product=“A(16,31096,9354,12)$zz$Uncharacterized membrane |
| | | | protein YfcA & COG0730” |
| | | CDS | complement(2296..2562) |
| | | | /product=“orf(16,31096,9354,42)$zz$ORF @ 10929-11196” |
| | | CDS | 2416..2856 |
| | | | /product=“orf(16,31096,9354,40)$zz$ORF @ 10635-11076” |
| | | CDS | complement(2575..2832) |
| | | | /product=“orf(16,31096,9354,41)$zz$ORF @ 10659-10917” |
| | | CDS | complement(2801..3055) |
| | | | /product=“orf(16,31096,9354,39)$zz$ORF @ 10436-10691” |
| | | CDS | complement(3301..3519) |
| | | | /product=“orf(16,31096,9354,37)$zz$ORF @ 9972-10191” |
| | | CDS | 3704..4162 |
| | | | /product=“orf(16,31096,9354,36)$zz$ORF @ 9329-9788” |
| | | CDS | complement(3752..4243) |
| | | | /product=“A(16,31096,9354,11)$zz$Protein of unknown |
| | | | function (DUF2442)/protein of unknown function (DUF4160) & |
| | | | pfam10387,pfam13711” |
| | | CDS | 4169..4396 |
| | | | /product=“orf(16,31096,9354,34)$zz$ORF @ 9095-9323” |
| | | CDS | 4341..4652 |
| | | | /product=“A(16,31096,9354,10)$zz$hypothetical protein & |
| | | | Hypo-rule applied” |
| | | CDS | complement(4422..4616) |
| | | | /product=“orf(16,31096,9354,33)$zz$ORF @ 8875-9070” |
| | | POI | 4801..7647 |
| | | | /product=“−> IscB(1,90)[33.7] \| IscB(348,448)[39.6] : |
| | | | A(16,31096,9354,9)$zz$RRXRR protein/HNH endonuclease & |
| | | | pfam14239,pfam13395” |
| | | CDS | 4801..7647 |
| | | | /product=“−> IscB(1,90)[33.7] \| IscB(348,448)[39.6] : |
| | | | A(16,31096,9354,9)$zz$RRXRR protein/HNH endonuclease & |
| | | | pfam14239,pfam13395” |
| | | CDS | complement(4805..5137) |
| | | | /product=“orf(16,31096,9354,31)$zz$ORF @ 8354-8687” |
| | | CDS | complement(6061..6246) |
| | | | /product=“orf(16,31096,9354,30)$zz$ORF @ 7245-7431” |
| | | CDS | 6125..6304 |
| | | | /product=“orf(16,31096,9354,29)$zz$ORF @ 7187-7367” |
| | | CDS | complement(6505..6915) |
| | | | /product=“orf(16,31096,9354,28)$zz$ORF @ 6576-6987” |
| | | CDS | complement(6915..7109) |
| | | | /product=“orf(16,31096,9354,27)$zz$ORF @ 6382-6577” |
| | | CDS | complement(7258..7512) |
| | | | /product=“orf(16,31096,9354,26)$zz$ORF @ 5979-6234” |
| | | CDS | complement(7491..7787) |
| | | | /product=“orf(16,31096,9354,24)$zz$ORF @ 5704-6001” |
| | | DR | 7818..7853 |
| | | DR | 7887..7922 |
| | | CDS | 7910..8137 |
| | | | /product=“orf(16,31096,9354,23)$zz$ORF @ 5354-5582” |
| | | DR | 7958..7993 |
| | | DR | 8027..8062 |
| | | CDS | complement(8178..8429) |
| | | | /product=“A(16,31096,9354,8)$zz$hypothetical protein & |
| | | | Hypo-rule applied” |
| | | CDS | complement(8519..8875) |
| | | | /product=“A(16,31096,9354,7)$zz$Uncharacterized conserved |
| | | | protein, contains HEPN domain & COG2361” |
| | | CDS | complement(8865..9200) |
| | | | /product=“A(16,31096,9354,6)$zz$hypothetical protein & |
| | | | KO:K07075” |
| | | CDS | complement(9256..9558) |
| | | | /product=“A(16,31096,9354,5)$zz$hypothetical protein & |
| | | | KO:K07075” |
| | | CDS | 9693..10760 |
| | | | /product=“orf(16,31096,9354,16)$zz$ORF @ 2731-3799” |
| | | CDS | complement(9696..10778) |
| | | | /product=“orf(16,31096,9354,15)$zz$ORF @ 2713-3796” |
| | | CDS | 9847..10281 |
| | | | /product=“orf(16,31096,9354,18)$zz$ORF @ 3210-3645” |
| | | CDS | complement(10442..10699) |
| | | | /product=“orf(16,31096,9354,17)$zz$ORF @ 2792-3050” |
| | | CDS | 10576..10845 |
| | | | /product=“orf(16,31096,9354,14)$zz$ORF @ 2646-2916” |
| | | CDS | complement(10717..10899) |
| | | | /product=“orf(16,31096,9354,13)$zz$ORF @ 2592-2775” |
| | | CDS | complement(10907..11149) |
| | | | /product=“orf(16,31096,9354,12)$zz$ORF @ 2342-2585” |
| | | CDS | 11043..11492 |
| | | | /product=“A(16,31096,9354,3)$zz$Nucleotide-binding |
| | | | universal stress protein, UspA family & COG0589” |
| | | CDS | complement(11055..11270) |
| | | | /product=“orf(16,31096,9354,11)$zz$ORF @ 2221-2437” |
| | | CDS | complement(11249..11563) |
| | | | /product=“orf(16,31096,9354,9)$zz$ORF @ 1928-2243” |
| | | CDS | complement(11457..11657) |
| | | | /product=“orf(16,31096,9354,8)$zz$ORF @ 1834-2035” |
| | | CDS | 11508..11963 |
| | | | /product=“A(16,31096,9354,2)$zz$Bacterioferritin |
| | | | (cytochrome b1) & COG2193” |
| | | CDS | complement(11654..11857) |
| | | | /product=“orf(16,31096,9354,7)$zz$ORF @ 1634-1838” |
| | | CDS | 12056..12247 |
| | | | /product=“orf(16,31096,9354,5)$zz$ORF @ 1244-1436” |
| | | CDS | complement(12065..12883) |
| | | | /product=“A(16,31096,9354,1)$zz$Ubiquinone/menaquinone |
| | | | biosynthesis C-methylase UbiE & COG2226” |
| | | CDS | 12342..12629 |
| | | | /product=“orf(16,31096,9354,4)$zz$ORF @ 862-1150” |
| | | CDS | 12521..12841 |
| | | | /product=“orf(16,31096,9354,3)$zz$ORF @ 650-971” |
| | | CDS | 13034..13489 |
| | | | /product=“A(16,31096,9354,0)$zz$hypothetical protein & |
| | | | Hypo-rule applied” |
| | | CDS | 13264..13491 |
| | | | /product=“orf(16,31096,9354,0)$zz$Partial ORF @ 0-228” |
| 114 | PWXP01000023.1 | CDS | complement(1..225) |
| | (Accession | | /product=“orf(1,245407,589,0)$zz$Partial ORF @ 0-225” |
| | PWXP01000023 | | |
| | | POI | 2..2971 |
| | | | /product=“−> IscB(42,212)[26.8] \| IscB(394,494)[35.3] : |
| | | | orf(1,245407,589,1)$zz$Partial ORF @ 1-2971” |
| | | CDS | 2..2971 |
| | | | /product=“−> IscB(42,212)[26.8] \| IscB(394,494)[35.3] : |
| | | | orf(1,245407,589,1)$zz$Partial ORF @ 1-2971” |
| | | CDS | complement(2..214) |
| | | | /product=“orf(1,245407,589,2)$zz$Partial ORF @ 1-214” |
| | | CDS | complement(269..1075) |
| | | | /product=“orf(1,245407,589,3)$zz$ORF @ 268-1075” |
| | | CDS | 381..722 |
| | | | /product=“orf(1,245407,589,4)$zz$ORF @ 380-722” |
| | | CDS | complement(1012..1323) |
| | | | /product=“orf(1,245407,589,5)$zz$ORF @ 1011-1323” |
| | | CDS | complement(1758..2075) |
| | | | /product=“orf(1,245407,589,6)$zz$ORF @ 1757-2075” |
| | | CDS | complement(1799..2230) |
| | | | /product=“orf(1,245407,589,7)$zz$ORF @ 1798-2230” |
| | | CDS | 1851..2069 |
| | | | /product=“orf(1,245407,589,8)$zz$ORF @ 1850-2069” |
| | | CDS | complement(2050..2286) |
| | | | /product=“orf(1,245407,589,9)$zz$ORF @ 2049-2286” |
| | | CDS | complement(2372..2749) |
| | | | /product=“orf(1,245407,589,10)$zz$ORF @ 2371-2749” |
| | | CDS | 3142..3657 |
| | | | /product=“orf(1,245407,589,11)$zz$ORF @ 3141-3657” |
| | | CDS | complement(3159..3473) |
| | | | /product=“orf(1,245407,589,12)$zz$ORF @ 3158-3473” |
| | | CDS | complement(3481..3822) |
| | | | /product=“orf(1,245407,589,13)$zz$ORF @ 3480-3822” |
| | | CDS | complement(3773..4294) |
| | | | /product=“orf(1,245407,589,14)$zz$ORF @ 3772-4294” |
| | | CDS | 4146..4490 |
| | | | /product=“orf(1,245407,589,15)$zz$ORF @ 4145-4490” |
| | | CDS | 4664..4981 |
| | | | /product=“orf(1,245407,589,16)$zz$ORF @ 4663-4981” |
| | | CDS | complement(4737..5048) |
| | | | /product=“orf(1,245407,589,17)$zz$ORF @ 4736-5048” |
| | | CDS | 4981..5439 |
| | | | /product=“orf(1,245407,589,18)$zz$ORF @ 4980-5439” |
| | | CDS | complement(5167..5430) |
| | | | /product=“orf(1,245407,589,19)$zz$ORF @ 5166-5430” |
| | | CDS | 5285..5584 |
| | | | /product=“orf(1,245407,589,20)$zz$ORF @ 5284-5584” |
| | | CDS | complement(5488..6231) |
| | | | /product=“orf(1,245407,589,21)$zz$ORF @ 5487-6231” |
| | | CDS | 5686..6336 |
| | | | /product=“orf(1,245407,589,22)$zz$ORF @ 5685-6336” |
| | | CDS | 6333..6797 |
| | | | /product=“orf(1,245407,589,23)$zz$ORF @ 6332-6797” |
| | | CDS | 6370..6972 |
| | | | /product=“orf(1,245407,589,24)$zz$ORF @ 6369-6972” |
| | | CDS | complement(6423..6626) |
| | | | /product=“orf(1,245407,589,25)$zz$ORF @ 6422-6626” |
| | | CDS | complement(6774..6995) |
| | | | /product=“orf(1,245407,589,26)$zz$ORF @ 6773-6995” |
| | | CDS | 6797..7369 |
| | | | /product=“orf(1,245407,589,27)$zz$ORF @ 6796-7369” |
| | | CDS | complement(6812..7189) |
| | | | /product=“orf(1,245407,589,28)$zz$ORF @ 6811-7189” |
| | | CDS | 7158..7343 |
| | | | /product=“orf(1,245407,589,29)$zz$ORF @ 7157-7343” |
| | | CDS | complement(7386..7661) |
| | | | /product=“orf(1,245407,589,30)$zz$ORF @ 7385-7661” |
| | | CDS | complement(7399..7686) |
| | | | /product=“orf(1,245407,589,31)$zz$ORF @ 7398-7686” |
| | | CDS | 7421..7801 |
| | | | /product=“orf(1,245407,589,32)$zz$ORF @ 7420-7801” |
| | | CDS | 7447..7896 |
| | | | /product=“orf(1,245407,589,33)$zz$ORF @ 7446-7896” |
| | | CDS | 7548..8738 |
| | | | /product=“orf(1,245407,589,34)$zz$ORF @ 7547-8738” |
| | | CDS | complement(7674..8654) |
| | | | /product=“orf(1,245407,589,35)$zz$ORF @ 7673-8654” |
| | | CDS | 8266..8673 |
| | | | /product=“orf(1,245407,589,36)$zz$ORF @ 8265-8673” |
| | | CDS | 8660..8890 |
| | | | /product=“orf(1,245407,589,37)$zz$ORF @ 8659-8890” |
| | | CDS | complement(8721..8939) |
| | | | /product=“orf(1,245407,589,38)$zz$ORF @ 8720-8939” |
| | | CDS | complement(8792..9139) |
| | | | /product=“orf(1,245407,589,39)$zz$ORF @ 8791-9139” |
| | | CDS | 8900..9517 |
| | | | /product=“orf(1,245407,589,40)$zz$ORF @ 8899-9517” |
| | | CDS | complement(8926..9294) |
| | | | /product=“orf(1,245407,589,41)$zz$ORF @ 8925-9294” |
| | | CDS | 8938..9567 |
| | | | /product=“orf(1,245407,589,42)$zz$ORF @ 8937-9567” |
| | | CDS | complement(9333..9626) |
| | | | /product=“orf(1,245407,589,43)$zz$ORF @ 9332-9626” |
| | | CDS | complement(9623..10333) |
| | | | /product=“orf(1,245407,589,44)$zz$ORF @ 9622-10333” |
| | | CDS | 9647..10522 |
| | | | /product=“orf(1,245407,589,45)$zz$ORF @ 9646-10522” |
| | | CDS | complement(9775..10740) |
| | | | /product=“orf(1,245407,589,46)$zz$ORF @ 9774-10740” |
| | | CDS | 10658..11356 |
| | | | /product=“orf(1,245407,589,47)$zz$ORF @ 10657-11356” |
| | | CDS | complement(10986..11732) |
| | | | /product=“orf(1,245407,589,48)$zz$ORF @ 10985-11732” |
| | | CDS | 11166..11786 |
| | | | /product=“orf(1,245407,589,49)$zz$ORF @ 11165-11786” |
| | | CDS | complement(11180..11410) |
| | | | /product=“orf(1,245407,589,50)$zz$ORF @ 11179-11410” |
| | | CDS | 11221..11436 |
| | | | /product=“orf(1,245407,589,51)$zz$ORF @ 11220-11436” |
| | | CDS | 11449..11661 |
| | | | /product=“orf(1,245407,589,52)$zz$ORF @ 11448-11661” |
| 115 | 0265313_10000447 | CDS | complement(420..623) |
| | (Accession | | /product=“orf(0,279806,446,103)$zz$ORF @ 26850-27054” |
| | 0265313_10000447) | | |
| | | CDS | 523..750 |
| | | | /product=“A(0,279806,446,20)$zz$hypothetical protein” |
| | | CDS | 905..1840 |
| | | | /product=“A(0,279806,446,21)$zz$hypothetical protein” |
| | | CDS | complement(1061..1378) |
| | | | /product=“orf(0,279806,446,106)$zz$ORF @ 27491-27809” |
| | | CDS | 1170..1388 |
| | | | /product=“orf(0,279806,446,107)$zz$ORF @ 27600-27819” |
| | | CDS | complement(1485..1925) |
| | | | /product=“orf(0,279806,446,108)$zz$ORF @ 27915-28356” |
| | | CDS | complement(1802..2074) |
| | | | /product=“orf(0,279806,446,109)$zz$ORF @ 28232-28505” |
| | | CDS | complement(1989..2750) |
| | | | /product=“orf(0,279806,446,110)$zz$ORF @ 28419-29181” |
| | | CDS | 2061..2747 |
| | | | /product=“−> pfam00239(4,141)[100.9] \| |
| | | | COG1961(2,221)[100.0] : A(0,279806,446,22)$zz$DNA |
| | | | invertase Pin-like site-specific DNA recombinase & |
| | | | COG1961” |
| | | CDS | complement(2189..2395) |
| | | | /product=“orf(0,279806,446,112)$zz$ORF @ 28619-28826” |
| | | CDS | complement(2597..3034) |
| | | | /product=“orf(0,279806,446,113)$zz$ORF @ 29027-29465” |
| | | CDS | complement(2959..3261) |
| | | | /product=“A(0,279806,446,23)$zz$hypothetical protein” |
| | | CDS | complement(3438..3746) |
| | | | /product=“A(0,279806,446,24)$zz$hypothetical protein” |
| | | CDS | complement(3806..4048) |
| | | | /product=“A(0,279806,446,25)$zz$hypothetical protein” |
| | | CDS | 3978..4145 |
| | | | /product=“orf(0,279806,446,117)$zz$ORF @ 30408-30576” |
| | | CDS | complement(4048..4296) |
| | | | /product=“A(0,279806,446,26)$zz$hypothetical protein” |
| | | CDS | complement(4306..4485) |
| | | | /product=“orf(0,279806,446,119)$zz$ORF @ 30736-30916” |
| | | CDS | complement(4482..4649) |
| | | | /product=“orf(0,279806,446,120)$zz$ORF @ 30912-31080” |
| | | CDS | complement(4582..4962) |
| | | | /product=“A(0,279806,446,27)$zz$hypothetical protein” |
| | | CDS | 4937..5131 |
| | | | /product=“orf(0,279806,446,122)$zz$ORF @ 31367-31562” |
| | | CDS | 4977..5288 |
| | | | /product=“orf(0,279806,446,123)$zz$ORF @ 31407-31719” |
| | | CDS | complement(5034..5591) |
| | | | /product=“A(0,279806,446,28)$zz$hypothetical protein” |
| | | CDS | 5218..5997 |
| | | | /product=“orf(0,279806,446,125)$zz$ORF @ 31648-32428” |
| | | CDS | complement(5604..6893) |
| | | | /product=“A(0,279806,446,29)$zz$hypothetical protein” |
| | | CDS | complement(6560..6742) |
| | | | /product=“orf(0,279806,446,127)$zz$ORF @ 32990-33173” |
| | | CDS | 6730..7026 |
| | | | /product=“orf(0,279806,446,128)$zz$ORF @ 33160-33457” |
| | | CDS | complement(7139..7456) |
| | | | /product=“orf(0,279806,446,129)$zz$ORF @ 33569-33887” |
| | | CDS | 7237..7437 |
| | | | /product=“orf(0,279806,446,130)$zz$ORF @ 33667-33868” |
| | | CDS | 7570..7758 |
| | | | /product=“orf(0,279806,446,131)$zz$ORF @ 34000-34189” |
| | | CDS | 7769..8257 |
| | | | /product=“orf(0,279806,446,132)$zz$ORF @ 34199-34688” |
| | | DR | 7792..7828 |
| | | CDS | 7843..8322 |
| | | | /product=“orf(0,279806,446,133)$zz$ORF @ 34273-34753” |
| | | DR | 7864..7895 |
| | | DR | 7896..7941 |
| | | CDS | 7938..8882 |
| | | | /product=“orf(0,279806,446,134)$zz$ORF @ 34368-35313” |
| | | DR | 7976..8012 |
| | | DR | 8046..8082 |
| | | DR | 8118..8154 |
| | | DR | 8189..8225 |
| | | DR | 8261..8297 |
| | | DR | 8332..8368 |
| | | DR | 8403..8439 |
| | | DR | 8474..8510 |
| | | DR | 8547..8583 |
| | | DR | 8620..8656 |
| | | DR | 8692..8728 |
| | | DR | 8763..8799 |
| | | DR | 8834..8870 |
| | | CDS | 8903..9892 |
| | | | /product=“orf(0,279806,446,135)$zz$ORF @ 35333-36323” |
| | | DR | 8905..8941 |
| | | DR | 8977..9013 |
| | | DR | 9049..9085 |
| | | CDS | 8903..9892 |
| | | | /product=“orf(0,279806,446,135)$zz$ORF @ 35333-36323” |
| | | DR | 9122..9158 |
| | | DR | 9193..9229 |
| | | DR | 9265..9301 |
| | | DR | 9338..9374 |
| | | CDS | 9391..9816 |
| | | | /product=“orf(0,279806,446,137)$zz$ORF @ 35821-36247” |
| | | DR | 9409..9445 |
| | | DR | 9481..9517 |
| | | DR | 9554..9590 |
| | | DR | 9625..9661 |
| | | DR | 9696..9732 |
| | | DR | 9767..9803 |
| | | CDS | complement(9832..10002) |
| | | | /product=“orf(0,279806,446,138)$zz$ORF @ 36262-36433” |
| | | POI | 10001..12817 |
| | | | /product=“−> IscB(2,160)[29.3] \| IscB(378,449)[33.1] \| |
| | | | cas9(397,509)[29.0] \| KOON_cd09643(402,582)[30.4] \| |
| | | | TIGR01865(401,582)[32.5] \| pfam13395(406,452)[37.0] \| |
| | | | pfam14239(2,172)[29.8] : A(0,279806,446,30)$zz$HNH |
| | | | endonuclease/RRXRR protein & pfam13395,pfam14239” |
| | | CDS | 10001..12817 |
| | | | /product=“−> IscB(2,160)[29.3] \| IscB(378,449)[33.1] \| |
| | | | cas9(397,509)[29.0] \| KOON_cd09643(402,582)[30.4] \| |
| | | | TIGR01865(401,582)[32.5] \| pfam13395(406,452)[37.0] \| |
| | | | pfam14239(2,172)[29.8] : A(0,279806,446,30)$zz$HNH |
| | | | endonuclease/RRXRR protein & pfam13395,pfam14239” |
| | | CDS | complement(10006..10227) |
| | | | /product=“orf(0,279806,446,140)$zz$ORF @ 36436-36658” |
| | | CDS | 10290..10625 |
| | | | /product=“orf(0,279806,446,141)$zz$ORF @ 36720-37056” |
| | | CDS | 10492..10725 |
| | | | /product=“orf(0,279806,446,142)$zz$ORF @ 36922-37156” |
| | | CDS | complement(10507..10722) |
| | | | /product=“orf(0,279806,446,143)$zz$ORF @ 36937-37153” |
| | | CDS | complement(11060..11977) |
| | | | /product=“orf(0,279806,446,144)$zz$ORF @ 37490-38408” |
| | | CDS | complement(11920..12096) |
| | | | /product=“orf(0,279806,446,145)$zz$ORF @ 38350-38527” |
| | | CDS | 11976..12281 |
| | | | /product=“orf(0,279806,446,146)$zz$ORF @ 38406-38712” |
| | | CDS | 12291..12488 |
| | | | /product=“orf(0,279806,446,147)$zz$ORF @ 38721-38919” |
| | | CDS | complement(12414..12626) |
| | | | /product=“orf(0,279806,446,148)$zz$ORF @ 38844-39057” |
| | | CDS | complement(12672..13262) |
| | | | /product=“orf(0,279806,446,149)$zz$ORF @ 39102-39693” |
| | | CDS | complement(12907..13416) |
| | | | /product=“A(0,279806,446,31)$zz$hypothetical protein” |
| | | CDS | 13025..13393 |
| | | | /product=“orf(0,279806,446,151)$zz$ORF @ 39455-39824” |
| | | CDS | complement(13433..13747) |
| | | | /product=“orf(0,279806,446,152)$zz$ORF @ 39863-40178” |
| | | CDS | 13768..14010 |
| | | | /product=“orf(0,279806,446,153)$zz$ORF @ 40198-40441” |
| | | CDS | complement(13940..14128) |
| | | | /product=“orf(0,279806,446,154)$zz$ORF @ 40370-40559” |
| | | CDS | 14257..14427 |
| | | | /product=“orf(0,279806,446,155)$zz$ORF @ 40687-40858” |
| | | CDS | 14469..14816 |
| | | | /product=“orf(0,279806,446,156)$zz$ORF @ 40899-41247” |
| | | CDS | complement(14546..14800) |
| | | | /product=“A(0,279806,446,32)$zz$hypothetical protein” |
| | | CDS | 14635..14883 |
| | | | /product=“orf(0,279806,446,157)$zz$ORF @ 41065-41314” |
| | | CDS | complement(14733..14900) |
| | | | /product=“orf(0,279806,446,158)$zz$ORF @ 41163-41331” |
| | | CDS | complement(14813..15040) |
| | | | /product=“A(0,279806,446,33)$zz$hypothetical protein” |
| | | CDS | complement(15178..16125) |
| | | | /product=“A(0,279806,446,34)$zz$hypothetical protein” |
| | | CDS | complement(16181..16927) |
| | | | /product=“A(0,279806,446,35)$zz$hypothetical protein” |
| | | CDS | complement(16665..16850) |
| | | | /product=“orf(0,279806,446,162)$zz$ORF @ 43095-43281” |
| | | CDS | 16842..17180 |
| | | | /product=“orf(0,279806,446,163)$zz$ORF @ 43272-43611” |
| 116 | 0123519_10012892 | CDS | complement(3..209) |
| | (Accession) | | /product=“orf(20,37532,12891,42)$zz$Partial ORF @ |
| | | | 11868-12075” |
| | | CDS | 134..394 |
| | | | /product=“orf(20,37532,12891,41)$zz$ORF @ |
| | | | 11683-11944” |
| | | CDS | 262..486 |
| | | | /product=“orf(20,37532,12891,40)$zz$ORF @ |
| | | | 11591-11816” |
| | | CDS | 545..745 |
| | | | /product=“orf(20,37532,12891,39)$zz$ORF @ |
| | | | 11332-11533” |
| | | CDS | 1118..1306 |
| | | | /product=“orf(20,37532,12891,37)$zz$ORF @ |
| | | | 10771-10960” |
| | | CDS | complement(1272..2759) |
| | | | /product=“A(20,37532,12891,6)$zz$Signal |
| | | | transduction |
| | | | histidine kinase & COG0642” |
| | | CDS | 1356..1736 |
| | | | /product=“orf(20,37532,12891,36)$zz$ORF @ |
| | | | 10341-10722” |
| | | CDS | 2164..2331 |
| | | | /product=“orf(20,37532,12891,35)$zz$ORF @ |
| | | | 9746-9914” |
| | | CDS | complement(2216..2584) |
| | | | /product=“orf(20,37532,12891,34)$zz$ORF @ |
| | | | 9493-9862” |
| | | CDS | 2331..2804 |
| | | | /product=“orf(20,37532,12891,31)$zz$ORF @ |
| | | | 9273-9747” |
| | | CDS | 2572..2769 |
| | | | /product=“orf(20,37532,12891,32)$zz$ORF @ |
| | | | 9308-9506” |
| | | CDS | complement(2977..3930) |
| | | | /product=“orf(20,37532,12891,30)$zz$ORF @ |
| | | | 8147-9101” |
| | | CDS | 3070..4752 |
| | | | /product=“orf(20,37532,12891,26)$zz$ORF @ |
| | | | 7325-9008” |
| | | CDS | complement(4285..4683) /product=“orf(20,37532,12891,27)$zz$ORF @ |
| | | | 7394-7793” |
| | | CDS | 4373..4621 |
| | | | /product=“orf(20,37532,12891,28)$zz$ORF @ |
| | | | 7456-7705” |
| | | CDS | 4425..4592 |
| | | | /product=“orf(20,37532, 12891,29)$zz$ORF @ |
| | | | 7485-7653” |
| | | CDS | 4889..5668 |
| | | | /product=“A(20,37532,12891,4)$zz$PTS system, |
| | | | mannose-specific IID component & KO:K02796” |
| | | CDS | complement(4913..5224) |
| | | | /product=“orf(20,37532,12891,23)$zz$ORF @ |
| | | | 6853-7165” |
| | | CDS | 4930..5145 |
| | | | /product=“orf(20,37532,12891,25)$zz$ORF @ |
| | | | 6932-7148” |
| | | CDS | complement(5017..5196) |
| | | | /product=“orf(20,37532,12891,24)$zz$ORF @ |
| | | | 6881-7061” |
| | | CDS | 5374..5679 |
| | | | /product=“orf(20,37532,12891,21)$zz$ORF @ |
| | | | 6398-6704 |
| | | CDS | complement(5661..5945) |
| | | | /product=“orf(20,37532,12891,20)$zz$ORF @ |
| | | | 6132-6417” |
| | | CDS | 5767..5979 |
| | | | /product=“A(20,37532,12891,3)$zz$phosphocarrier |
| | | | protein & |
| | | | KO:K11189” |
| | | CDS | complement(5946..6203) /product=“orf(20,37532,12891,17)$zz$ORF @ |
| | | | 5874-6132” |
| | | CDS | complement(5946..6203) |
| | | | /product=“orf(20,37532,12891,17)$zz$ORF @ |
| | | | 5874-6132” |
| | | CDS | complement(5965..6678) |
| | | | /product=“orf(20,37532,12891,16)$zz$ORF @ |
| | | | 5399-6113” |
| | | CDS | 5998..7791 |
| | | | / |
| | | | product=“A(20,37532,12891,2)$zz$phosphotransferase |
| | | | system, enzyme I, PtsI & KO:K08483” |
| | | CDS | 6018..6185 |
| | | | /product=“orf(20,37532,12891,18)$zz$ORF @ |
| | | | 5892-6060” |
| | | CDS | complement(6889..7476) |
| | | | /product=“orf(20,37532,12891,15)$zz$ORF @ |
| | | | 4601-5189” |
| | | CDS | complement(7500..7724) |
| | | | /product=“orf(20,37532,12891,14)$zz$ORF @ |
| | | | 4353-4578” |
| | | CDS | complement(7624..7851) |
| | | | /product=“orf(20,37532,12891,12)$zz$ORF @ |
| | | | 4226-4454” |
| | | CDS | 7791..7973 |
| | | | /product=“orf(20,37532,12891,11)$zz$ORF @ |
| | | | 4104-4287” |
| | | CDS | 7801..8274 |
| | | | /product=“A(20,37532,12891,1)$zz$SsrA-binding |
| | | | protein & |
| | | | KO:K03664” |
| | | CDS | complement(8133..8387) |
| | | | /product=“orf(20,37532,12891,9)$zz$ORF @ |
| | | | 3690-3945” |
| | | CDS | complement(8524..8691) |
| | | | /product=“orf(20,37532,12891,8)$zz$ORF @ |
| | | | 3386-3554” |
| | | POI | 8924..11773 |
| | | | /product=“−> IscB(1,64)[32.3] \| IscB(344,443) |
| | | | [43.8] : |
| | | | A(20,37532,12891,0)$zz$RRXRR protein/HNH |
| | | | endonuclease & |
| | | | pfam14239,pfam13395” |
| | | CDS | 8924..11773 |
| | | | /product=“−> IscB(1,64)[32.3] \| IscB(344,443) |
| | | | [43.8] : |
| | | | A(20,37532,12891,0)$zz$RRXRR protein/HNH |
| | | | endonuclease & |
| | | | pfam14239,pfam13395” |
| | | | CDS complement(8944..9171) |
| | | CDS | complement(8944..9171) |
| | | | /product=“orf(20,37532,12891,7)$zz$ORF @ |
| | | | 2906-3134” |
| | | CDS | complement(9302..9694) |
| | | | /product=“orf(20,37532,12891,6)$zz$ORF @ |
| | | | 2383-2776” |
| | | CDS | 10059..10268 |
| | | | /product=“orf(20,37532,12891,5)$zz$ORF @ |
| | | | 1809-2019” |
| | | CDS | complement(10502..10846) |
| | | | /product=“orf(20,37532, 12891,4)$zz$ORF @ |
| | | | 1231-1576” |
| | | CDS | complement(10985..11173) |
| | | | /product=“orf(20,37532,12891,3)$zz$ORF @ |
| | | | 904-1093” |
| | | CDS | 11454..11654 |
| | | | /product=“orf(20,37532,12891,2)$zz$ORF @ 423-624” |
| | | CDS | complement(11747..11917) |
| | | | /product=“orf(20,37532, 12891,0)$zz$ORF @ 160-331” |
| | | DR | 11978..12003 |
| | | DR | 12051..12076 |
| 117 | 0315281_10148687 | CDS | complement(2..643) |
| | (accession | | /product=“−> pfam03819(34,107)[86.6] \| |
| | 0315281_10148687) | | pfam03819(167,213)[21.6] \| COG3956(10,214) |
| | | | [207.0] : |
| | | | A(7,281632,148686,2)$zz$tetrapyrrole methylase |
| | | | family |
| | | | protein/MazG family protein/ATP diphosphatase & |
| | | | KO:K02499,KO:K04765” |
| | | CDS | 24..329 /product=“orf(7,281632,148686,8)$zz$Partial ORF @ |
| | | | 2328-2634” |
| | | CDS | complement(85..330) |
| | | | /product=“orf(7,281632,148686,7)$zz$ORF @ |
| | | | 2327-2573” |
| | | CDS | complement(775..1305) |
| | | | /product=“−> pfam02674(4,146)[99.7] \| |
| | | | COG1286(1,175)[94.0]: |
| | | | A(7,281632,148686,1)$zz$membrane |
| | | | protein required forcolicin V production & |
| | | | KO:K03558” |
| | | CDS | 1033..1257 |
| | | | /product=“orf(7,281632,148686,5)$zz$ORF @ |
| | | | 1400-1625” |
| | | POI | 1492..2655 |
| | | | /product=“−> IscB(4,159)[25.5] \| pfam14239(2,113) |
| | | | [27.2] : |
| | | | A(7,281632,148686,0)$zz$RRXRR protein & |
| | | | pfam14239” |
| | | CDS | 1492..2655 |
| | | | /product=“−> IscB(4,159)[25.5] \| pfam14239(2,113) |
| | | | [27.2] : |
| | | | A(7,281632,148686,0)$zz$RRXRR protein & |
| | | | pfam14239” |
| | | CDS | 2072..2257 |
| | | | /product=“orf(7,281632,148686,3)$zz$ORF @ |
| | | | 400-586” |
| | | CDS | complement(2450..2656) |
| | | | /product=“orf(7,281632,148686,0)$zz$Partial ORF @ |
| | | | 1-208” |
| | | CDS | complement(2458..2655) |
| | | | /product=“orf(7,281632,148686,1)$zz$Partial ORF @ |
| | | | 2-200” |
| | | | ORIGIN |
| 118 | 0209777_10000467 | CDS | complement(259..1047) |
| | (Accession | | /product=“orf(14,26210,466,179)$zz$ORF @ |
| | 0209777_10000467) | | 59108-59897” |
| | | CDS | 371..877 |
| | | | /product=“A(14,26210,466,63)$zz$hypothetical |
| | | | protein” |
| | | CDS | complement(711..905) |
| | | | /product=“orf(14,26210,466,180)$zz$ORF @ |
| | | | 59250-59445” |
| | | CDS | complement(830..1063) |
| | | | /product=“orf(14,26210,466,178)$zz$ORF @ |
| | | | 59092-59326” |
| | | CDS | complement(1106..1285) |
| | | | /product=“orf(14,26210,466,177)$zz$ORF @ |
| | | | 58870-59050” |
| | | CDS | complement(1575..2864) /product=“−> pfam00709(4,420)[591.4] \| |
| | | | COG0104(1,427)[616.9] : |
| | | | A(14,26210,466,62)$zz$adenylosuccinate synthase & |
| | | | KO:K01939” |
| | | CDS | 1803..2189 |
| | | | /product=“orf(14,26210,466,176)$zz$ORF @ |
| | | | 57966-58353” |
| | | CDS | complement(2342..2521) |
| | | | /product=“orf(14,26210,466,175)$zz$ORF @ |
| | | | 57634-57814” |
| | | CDS | complement(2938..4530) |
| | | | /product=“−> pfam02826(110,284)[213.7] \| |
| | | | COG0111(2,325)[390.9] : |
| | | | A(14,26210,466,61)$zz$D-3-phosphoglycerate |
| | | | dehydrogenase & |
| | | | KO:K00058” |
| | | CDS | 3916..4182 |
| | | | /product=“orf(14,26210,466,173)$zz$ORF @ |
| | | | 55973-56240” |
| | | CDS | 4207..4494 |
| | | | /product=“orf(14,26210,466,172)$zz$ORF @ |
| | | | 55661-55949” |
| | | CDS | 4256..4579 |
| | | | /product=“orf(14,26210,466,170)$zz$ORF @ |
| | | | 55576-55900” |
| | | CDS | complement(4641..5780) |
| | | | /product=“−> pfam00266(4,348)[181.6] \| |
| | | | COG0075(1,379)[446.9] : |
| | | | A(14,26210,466,60)$zz$aspartate |
| | | | aminotransferase-like enzyme & COG0075” |
| | | CDS | 4914..5561 |
| | | | /product=“orf(14,26210,466,169)$zz$ORF @ |
| | | | 54594-55242” |
| | | CDS | 6076..6330 |
| | | | /product=“A(14,26210,466,59)$zz$hypothetical |
| | | | protein” |
| | | CDS | complement(6309..6614) |
| | | | /product=“orf(14,26210,466,165)$zz$ORF @ |
| | | | 53541-53847” |
| | | CDS | 6330..7412 |
| | | | /product=“−> pfam00557(141,344)[221.7] \| |
| | | | pfam01321(9,134)[87.6] \| COG0006(3,360)[334.0] : |
| | | | A(14,26210,466,58)$zz$Xaa-Pro aminopeptidase & |
| | | | KO:K01262” |
| | | CDS | 6397..6573 |
| | | | /product=“orf(14,26210,466,166)$zz$ORF @ |
| | | | 53582-53759” |
| | | CDS | complement(6921..7199) |
| | | | /product=“orf(14,26210,466,164)$zz$ORF @ |
| | | | 52956-53235” |
| | | CDS | 6934..7206 |
| | | | /product=“orf(14,26210,466,163)$zz$ORF @ |
| | | | 52949-53222” |
| | | CDS | 7025..7234 |
| | | | /product=“orf(14,26210,466,162)$zz$ORF @ |
| | | | 52921-53131” |
| | | CDS | complement(7630..8799) |
| | | | /product=“−> pfam00589(203,362)[129.2] \| |
| | | | COG0582(67,377)[116.0] : |
| | | | A(14,26210,466,57)$zz$integrase & |
| | | | COG0582” |
| | | CDS | 7946..8161 |
| | | | /product=“orf(14,26210,466,160)$zz$ORF @ |
| | | | 51994-52210” |
| | | CDS | 9024..9305 /product=“ A(14,26210,466,56)$zz$hypothetical |
| | | | protein” |
| | | POI | 10001..12829 /product=“−> IscB(1,69)[34.6] \| IscB(349,453) |
| | | | [40.2] \| pfam14239(1,79)[32.6] \| pfam13395(405,451) |
| | | | [23.7] : A(14,26210,466,55)$zz$RRXRR protein/HNH |
| | | | endonuclease & pfam14239,pfam13395” |
| | | | 10001..12829 /product=“−> IscB(1,69)[34.6] \| IscB(349,453) |
| | | | [40.2] \| pfam14239(1,79)[32.6] \| pfam13395(405,451) |
| | | | [23.7] : A(14,26210,466,55)$zz$RRXRR protein/HNH |
| | | | endonuclease & pfam14239,pfam13395” |
| | | | 10560..10757 |
| | | | /product=“orf(14,26210,466,157)$zz$ORF @ |
| | | | 49398-49596” |
| | | | complement(10603..10851) |
| | | | /product=“orf(14,26210,466,156)$zz$ORF @ |
| | | | 49304-49553” |
| | | | complement(10697..11164) |
| | | | /product=“orf(14,26210,466,155)$zz$ORF @ |
| | | | 48991-49459” |
| | | | complement(12792..12971) |
| | | | /product=“orf(14,26210,466,153)$zz$ORF @ |
| | | | 47184-47364” |
| | | DR | 13039..13070 |
| | | DR | 13109..13140 |
| | | DR | 13179..13210 |
| | | DR | 13250..13281 |
| | | DR | 13320..13351 |
| | | DR | 13391..13422 |
| | | CDS | 13968..14237 |
| | | | /product=“A(14,26210,466,54)$zz$hypothetical |
| | | | protein” |
| | | CDS | 14234..14662 |
| | | | /product=“A(14,26210,466,53)$zz$hypothetical |
| | | | protein” |
| | | CDS | 14289..14516 |
| | | | /product=“orf(14,26210,466,151)$zz$ORF @ |
| | | | 45639-45867” |
| | | CDS | complement(14371..14778) |
| | | | /product=“orf(14,26210,466,149)$zz$ORF @ |
| | | | 45377-45785” |
| | | CDS | complement(14726..14986) |
| | | | /product=“orf(14,26210,466,148)$zz$ORF @ |
| | | | 45169-45430” |
| | | CDS | complement(15023..15286) |
| | | | /product=“A(14,26210,466,52)$zz$hypothetical |
| | | | protein” |
| | | CDS | 15360..15536 |
| | | | /product=“orf(14,26210,466,146)$zz$ORF @ |
| | | | 44619-44796” |
| | | CDS | complement(15407..15601) |
| | | | /product=“A(14,26210,466,51)$zz$hypothetical |
| | | | protein” |
| | | CDS | complement(15579..16346) /product=“−> pfam07505(4,234)[281.0] \| |
| | | | COG4422(1,239)[293.8] : |
| | | | A(14,26210,466,50)$zz$protein gp37 |
| | | | & COG4422” |
| | | CDS | 15661..15933 |
| | | | /product=“orf(14,26210,466,144)$zz$ORF @ |
| | | | 44222-44495” |
| | | CDS | complement(16177..16404) |
| | | | /product=“orf(14,26210,466,142)$zz$ORF @ |
| | | | 43751-43979” |
| | | CDS | complement(16576..16758) |
| | | | /product=“orf(14,26210,466,141)$zz$ORF @ |
| | | | 43397-43580” |
| | | CDS | 17074..17310 |
| | | | /product=“orf(14,26210,466,140)$zz$ORF @ |
| | | | 42845-43082” |
| | | CDS | 17165..17800 |
| | | | /product=“A(14,26210,466,49)$zz$hypothetical |
| | | | protein” |
| | | CDS | complement(17972..18145) |
| | | | /product=“A(14,26210,466,48)$zz$hypothetical |
| | | | protein” |
| | | CDS | complement(18156..19151) |
| | | | /product=“−> pfam14559(125,188)[32.6] \| |
| | | | pfam13432(83,147)[32.4] \| COG0457(10,327)[77.2] : |
| | | | A(14,26210,466,47)$zz$tetratricopeptide (TPR) |
| | | | Repeat protein & COG0457” |
| | | CDS | complement(18359..18556) |
| | | | /product=“orf(14,26210,466,137)$zz$ORF @ |
| | | | 41599-41797” |
| | | CDS | 18663..18836 |
| | | | /product=“orf(14,26210,466,136)$zz$ORF @ |
| | | | 41319-41493” |
| | | CDS | 18836..19021 |
| | | | /product=“orf(14,26210,466,135)$zz$ORF @ |
| | | | 41134-41320” |
| | | CDS | 19205..19462 |
| | | | /product=“orf(14,26210,466,133)$zz$ORF @ |
| | | | 40693-40951” |
| | | CDS | complement(19265..19870) |
| | | | /product=“−> pfam00239(3,146)[151.4] \| |
| | | | COG1961(1,200)[149.0] : A(14,26210,466,46)$zz$DNA |
| | | | invertase Pin-like site-specific DNA recombinase |
| | | | & COG1961” |
| | | CDS | 19269..19769 |
| | | | /product=“orf(14,26210,466,132)$zz$ORF @ |
| | | | 40386-40887” |
| | | CDS | complement(19946..20092) |
| | | | /product=“A(14,26210,466,45)$zz$hypothetical |
| | | | protein” |
| | | CDS | complement(20070..20306) |
| | | | /product=“orf(14,26210,466,130)$zz$ORF @ |
| | | | 39849-40086” |
| | | CDS | complement(20149..20271) |
| | | | /product=“A(14,26210,466,44)$zz$hypothetical |
| | | | protein” |
| | | CDS | complement(20264..20356) |
| | | | /product=“A(14,26210,466,43)$zz$hypothetical |
| | | | protein” |
| | | CDS | complement(20859..21848) |
| | | | /product=“A(14,26210,466,42)$zz$hypothetical |
| | | | protein” |
| | | CDS | 21577..21774 |
| | | | /product=“orf(14,26210,466,129)$zz$ORF @ |
| | | | 38381-38579” |
| | | CDS | 21936..22151 |
| | | | /product=“orf(14,26210,466,127)$zz$ORF @ |
| | | | 38004-38220” |
| 119 | 0209017_10002254 | CDS | 2..211 |
| | (Accession | | /product=“orf(20,37423,2253,0)$zz$Partial ORF @ |
| | 0209017_10002254) | | 1-211” |
| | | DR | 28..62 |
| | | DR | 94..128 |
| | | DR | 159..193 |
| | | CDS | complement(202..534) |
| | | | /product=“orf(20,37423,2253,1)$zz$ORF @ 201-534” |
| | | DR | 225..259 |
| | | DR | 291..325 |
| | | CDS | 307..747 /product=“orf(20,37423,2253,2)$zz$ORF @ 306-747” |
| | | DR | 357..391 |
| | | DR | 423..457 |
| | | DR | 489..523 |
| | | DR | 555..589 |
| | | DR | 620..654 |
| | | DR | 686..720 |
| | | CDS | 744..944 |
| | | | /product=“orf(20,37423,2253,3)$zz$ORF @ 743-944” |
| | | DR | 752..786 |
| | | DR | 818..852 |
| | | DR | 884..918 |
| | | CDS | complement(890..1348) |
| | | | /product=“orf(20,37423,2253,4)$zz$ORF @ 889-1348” |
| | | DR | 949..983 |
| | | CDS | 965..1426 |
| | | | /product=“orf(20,37423,2253,5)$zz$ORF @ 964-1426” |
| | | DR | 1015..1049 |
| | | DR | 1081..1115 |
| | | POI | 1308..4538 |
| | | | /product=“−> IscB(2,167)[28.2] \| IscB(412,517) |
| | | | [34.4] \| |
| | | | pfam14239(1,74)[31.3] \| pfam13395(471,515)[29.9] |
| | | | \| |
| | | | COG1403(434,534)[21.6] : |
| | | | A(20,37423,2253,0)$zz$5-methylcytosine-specific |
| | | | restriction endonuclease McrA & COG1403” |
| | | CDS | 1308..4538 |
| | | | /product=“−> IscB(2,167)[28.2] \| IscB(412,517) |
| | | | [34.4] \| |
| | | | pfam14239(1,74)[31.3] \| pfam13395(471,515)[29.9] |
| | | | \| |
| | | | COG1403(434,534)[21.6] : |
| | | | A(20,37423,2253,0)$zz$5-methylcytosine-specific |
| | | | restriction endonuclease McrA & COG1403” |
| | | CDS | complement(1644..2609) |
| | | | /product=“orf(20,37423,2253,7)$zz$ORF @ |
| | | | 1643-2609” |
| | | CDS | 2155..2508 |
| | | | /product=“orf(20,37423,2253,8)$zz$ORF @ |
| | | | 2154-2508” |
| | | CDS | complement(2327..2545) |
| | | | /product=“orf(20,37423,2253,9)$zz$ORF @ |
| | | | 2326-2545” |
| | | CDS | complement(2793..3581) |
| | | | /product=“orf(20,37423,2253,10)$zz$ORF @ |
| | | | 2792-3581” |
| | | CDS | 2825..3028 |
| | | | /product=“orf(20,37423,2253,11)$zz$ORF @ |
| | | | 2824-3028” |
| | | CDS | complement(3179..3628) |
| | | | /product=“orf(20,37423,2253,12)$zz$ORF @ |
| | | | 3178-3628” |
| | | CDS | complement(3633..4277) |
| | | | /product=“orf(20,37423,2253,13)$zz$ORF @ |
| | | | 3632-4277” |
| | | CDS | complement(4142..4432) |
| | | | /product=“orf(20,37423,2253,14)$zz$ORF @ |
| | | | 4141-4432” |
| | | CDS | complement(4189..4488) |
| | | | /product=“orf(20,37423,2253,15)$zz$ORF @ |
| | | | 4188-4488” |
| | | CDS | 5032..5832 |
| | | | /product=“A(20,37423,2253,1)$zz$hypothetical |
| | | | protein” |
| | | CDS | 5088..5426 |
| | | | /product=“orf(20,37423,2253,17)$zz$ORF @ |
| | | | 5087-5426 |
| | | CDS | complement(5251..5844) |
| | | | /product=“orf(20,37423,2253,18)$zz$ORF @ |
| | | | 5250-5844” |
| | | CDS | complement(5655..6071) |
| | | | /product=“orf(20,37423,2253,19)$zz$ORF @ |
| | | | 5654-6071” |
| | | CDS | complement(5861..6046) |
| | | | /product=“orf(20,37423,2253,20)$zz$ORF @ |
| | | | 5860-6046” |
| | | CDS | 5893..6081 |
| | | | /product=“orf(20,37423,2253,21)$zz$ORF @ |
| | | | 5892-6081” |
| | | CDS | complement(6013..6543) |
| | | | /product=“orf(20,37423,2253,23)$zz$ORF @ |
| | | | 6012-6543” |
| | | CDS | 6101..6214 |
| | | | /product=“ A(20,37423,2253,2)$zz$hypothetical |
| | | | protein” |
| | | CDS | 6211..6852 |
| | | | /product=“A(20,37423,2253,3)$zz$hypothetical |
| | | | protein” |
| | | CDS | complement(6327..6530) |
| | | | /product=“orf(20,37423,2253,25)$zz$ORF @ |
| | | | 6326-6530” |
| | | CDS | 6329..6526 |
| | | | /product=“orf(20,37423,2253,26)$zz$ORF @ |
| | | | 6328-6526” |
| | | CDS | 6849..7211 |
| | | | /product=“orf(20,37423,2253,27)$zz$ORF @ |
| | | | 6848-7211” |
| | | CDS | 6992..7387 |
| | | | /product=“orf(20,37423,2253,28)$zz$ORF @ |
| | | | 6991-7387” |
| | | CDS | complement(7306..7701) |
| | | | /product=“orf(20,37423,2253,29)$zz$ORF @ |
| | | | 7305-7701” |
| | | CDS | 7403..8545 /product=“−> pfam01380(50,183)[92.2] \| |
| | | | pfam00571(281,337)[40.7] \| COG0794(18,217)[220.5] |
| | | | \| COG2905(208,345)[47.0] : |
| | | | A(20,37423,2253,4)$zz$arabinose-5-phosphate |
| | | | isomerase & KO:K06041” |
| | | CDS | 7696..8265 |
| | | | /product=“orf(20,37423,2253,31)$zz$ORF @ |
| | | | 7695-8265” |
| | | CDS | complement(7741..8385) |
| | | | /product=“orf(20,37423,2253,32)$zz$ORF @ |
| | | | 7740-8385” |
| | | CDS | 7935..8171 |
| | | | /product=“orf(20,37423,2253,33)$zz$ORF @ |
| | | | 7934-8171” |
| | | CDS | 8559..8738 |
| | | | /product=“orf(20,37423,2253,34)$zz$ORF @ |
| | | | 8558-8738” |
| | | CDS | 8566..8757 |
| | | | /product=“orf(20,37423,2253,35)$zz$ORF @ |
| | | | 8565-8757” |
| | | CDS | complement(8617..8865) |
| | | | /product=“orf(20,37423,2253,36)$zz$ORF @ |
| | | | 8616-8865” |
| | | CDS | 8871..12215 /product=“A(20,37423,2253,5)$zz$hypothetical |
| | | | protein” |
| | | CDS | complement(9105..9917) |
| | | | /product=“orf(20,37423,2253,38)$zz$ORF @ |
| | | | 9104-9917” |
| | | CDS | 9758..10126 |
| | | | /product=“orf(20,37423,2253,39)$zz$ORF @ |
| | | | 9757-10126” |
| | | CDS | complement(10041..10892) |
| | | | /product=“orf(20,37423,2253,40)$zz$ORF @ |
| | | | 10040-10892” |
| | | CDS | 10226..10660 |
| | | | /product=“orf(20,37423,2253,41)$zz$ORF @ |
| | | | 10225-10660” |
| | | CDS | 10690..10971 |
| | | | /product=“orf(20,37423,2253,42)$zz$ORF @ |
| | | | 10689-10971” |
| | | CDS | complement(10905..12320) |
| | | | /product=“orf(20,37423,2253,43)$zz$ORF @ |
| | | | 10904-12320” |
| | | CDS | complement(10937..11758) |
| | | | /product=“orf(20,37423,2253,44)$zz$ORF @ |
| | | | 10936-11758” |
| | | CDS | complement(11347..11553) |
| | | | /product=“orf(20,37423,2253,45)$zz$ORF @ |
| | | | 11346-11553” |
| | | CDS | complement(11780..11968) |
| | | | /product=“orf(20,37423,2253,46)$zz$ORF @ |
| | | | 11779-11968” |
| | | CDS | 12028..12198 |
| | | | /product=“orf(20,37423,2253,47)$zz$ORF ( |
| | | | 12027-12198” |
| | | CDS | complement(12092..12286) |
| | | | /product=“orf(20,37423,2253,48)$zz$ORF @ |
| | | | 12091-12286” |
| | | CDS | complement(12617..12799) |
| | | | /product=“orf(20,37423,2253,49)$zz$Partial ORF @ |
| | | | 12616-12799” |
| 120 | TOLCLC_10013699 | CDS | 2..196 /product=“orf(14,27625,7029,41)$zz$Partial ORF @ |
| | (Accession | | 10989-11184” |
| | TOLCLC_10013699) | | |
| | | CDS | 3..272 |
| | | | /product=“orf(14,27625,7029,40)$zz$Partial ORF @ |
| | | | 10913-11183” |
| | | CDS | complement(42..296) |
| | | | /product=“A(14,27625,7029,9)$zz$Protein of |
| | | | unknown |
| | | | function (DUF2007) & pfam09413” |
| | | CDS | complement(242..589) |
| | | | /product=“orf(14,27625,7029,37)$zz$ORF @ |
| | | | 10596-10944” |
| | | CDS | 326..625 |
| | | | /product=“A(14,27625,7029,8)$zz$Predicted RNAbinding |
| | | | protein containing KH domain, possibly ribosomal |
| | | | protein - |
| | | | COG1534 & COG1534” |
| | | CDS | complement(376..558) |
| | | | /product=“orf(14,27625,7029,38)$zz$ORF @ |
| | | | 10627-10810” |
| | | CDS | complement(1156..1518) |
| | | | /product=“orf(14,27625,7029,35)$zz$ORF @ |
| | | | 9667-10030” |
| | | POI | 1294..4158 |
| | | | /product=“−> IscB(9,178)[25.5] \| IscB(359,460) |
| | | | [44.6] : |
| | | | A(14,27625,7029,7)$zz$HNH endonuclease & |
| | | | pfam01844” |
| | | CDS | 1294..4158 |
| | | | /product=“−> IscB(9,178)[25.5] \| IscB(359,460) |
| | | | [44.6] : |
| | | | A(14,27625,7029,7)$zz$HNH endonuclease & |
| | | | pfam01844” |
| | | CDS | complement(1341..1544) |
| | | | /product=“orf(14,27625,7029,33)$zz$ORF @ |
| | | | 9641-9845” |
| | | CDS | 1343..1537 |
| | | | /product=“orf(14,27625,7029,34)$zz$ORF @ |
| | | | 9648-9843” |
| | | CDS | complement(1983..2174) |
| | | | /product=“orf(14,27625,7029,32)$zz$ORF @ |
| | | | 9011-9203” |
| | | CDS | 2225..2569 |
| | | | /product=“orf(14,27625,7029,30)$zz$ORF @ |
| | | | 8616-8961” |
| | | CDS | complement(2288..2497) /product=“orf(14,27625,7029,31)$zz$ORF @ |
| | | | 8688-8898” |
| | | CDS | complement(2721..2957) |
| | | | /product=“orf(14,27625,7029,29)$zz$ORF @ |
| | | | 8228-8465” |
| | | CDS | 2864..3118 |
| | | | /product=“orf(14,27625,7029,28)$zz$ORF @ |
| | | | 8067-8322” |
| | | CDS | complement(3136..3444) |
| | | | /product=“orf(14,27625,7029,27)$zz$ORF @ |
| | | | 7741-8050” |
| | | CDS | complement(3559..3732) |
| | | | /product=“orf(14,27625,7029,26)$zz$ORF @ |
| | | | 7453-7627” |
| | | CDS | complement(4118..4333) |
| | | | /product=“orf(14,27625,7029,24)$zz$ORF @ |
| | | | 6852-7068” |
| | | DR | 4356..4391 |
| | | DR | 4426..4461 |
| | | DR | 4496..4531 |
| | | DR | 4566..4601 |
| | | DR | 4636..4671 |
| | | DR | 4706..4741 |
| | | CDS | complement(4724..4894) |
| | | | /product=“orf(14,27625,7029,23)$zz$ORF @ |
| | | | 6291-6462” |
| | | CDS | 4758..4925 |
| | | | /product=“orf(14,27625,7029,22)$zz$ORF @ |
| | | | 6260-6428” |
| | | DR | 4776..4811 |
| | | DR | 4845..4880 |
| | | DR | 4915..4950 |
| | | DR | 4984..5019 |
| | | DR | 5054..5089 |
| | | DR | 5124..5159 |
| | | DR | 5193..5228 |
| | | DR | 5251..5286 |
| | | CDS | 5480..5872 |
| | | | /product=“A(14,27625,7029,6)$zz$hypothetical |
| | | | protein” |
| | | CDS | 5820..7154 |
| | | | /product=“A(14,27625,7029,5)$zz$hypothetical |
| | | | protein” |
| | | CDS | 6235..6459 |
| | | | /product=“orf(14,27625,7029,20)$zz$ORF @ |
| | | | 4726-4951” |
| | | CDS | 7154..7822 |
| | | | /product=“A(14,27625,7029,4)$zz$hypothetical |
| | | | protein” |
| | | CDS | complement(7202..7420) |
| | | | /product=“orf(14,27625,7029,18)$zz$ORF @ |
| | | | 3765-3984” |
| | | CDS | complement(7996..8289) |
| | | | /product=“orf(14,27625,7029,16)$zz$ORF @ |
| | | | 2896-3190” |
| | | CDS | complement(8305..8481) |
| | | | /product=“orf(14,27625,7029,15)$zz$ORF @ |
| | | | 2704-2881” |
| | | CDS | 8451..9467 |
| | | | /product=“orf(14,27625,7029,10)$zz$ORF @ |
| | | | 1718-2735” |
| | | CDS | complement(8558..8776) |
| | | | /product=“orf(14,27625,7029,14)$zz$ORF @ |
| | | | 2409-2628” |
| | | CDS | complement(8691..9086) |
| | | | /product=“orf(14,27625,7029,12)$zz$ORF @ |
| | | | 2099-2495” |
| | | CDS | complement(8786..9031) |
| | | | /product=“orf(14,27625,7029,13)$zz$ORF @ |
| | | | 2154-2400” |
| | | CDS | 8986..9219 |
| | | | /product=“orf(14,27625,7029,11)$zz$ORF @ |
| | | | 1966-2200” |
| | | CDS | complement(9314..9652) |
| | | | /product=“orf(14,27625,7029,8)$zz$ORF @ |
| | | | 1533-1872” |
| | | CDS | 9337..9513 |
| | | | /product=“orf(14,27625,7029,9)$zz$ORF @ |
| | | | 1672-1849” |
| | | CDS | 9464..9880 |
| | | | /product=“A(14,27625,7029,2)$zz$hypothetical |
| | | | protein” |
| | | CDS | 9640..9840 |
| | | | /product=“orf(14,27625,7029,7)$zz$ORF @ |
| | | | 1345-1546” |
| | | CDS | complement(9673..10329) |
| | | | /product=“orf(14,27625,7029,4)$zz$ORF @ 856-1513” |
| | | CDS | 9877..10314 |
| | | | /product=“ A(14,27625,7029,1)$zz$hypothetical |
| | | | protein” |
| | | CDS | complement(10157..10339) |
| | | | /product=“orf(14,27625,7029,3)$zz$ORF @ 846-1029” |
| | | CDS | 10328..11185 |
| | | | /product=“−> pfam01590(33,169)[90.8] \| |
| | | | pfam01590(200,285)[39.7] \| COG2203(16,170) |
| | | | [71.6] : |
| | | | A(14,27625,7029,0)$zz$FOG: GAF domain & COG2203” |
| | | CDS | complement(10681..11088) |
| | | | /product=“orf(14,27625,7029,2)$zz$ORF @ 97-505” |
| | | CDS | complement(10769..11185) |
| | | | /product=“orf(14,27625,7029,0)$zz$Partial ORF @ |
| | | | 0-417” |
| 121 | 0105107_10004396 | CDS | /product=“A(18,34121,4395,0)$zz$hypothetical |
| | (Accession | | protein & Hypo-rule applied” |
| | 0105107_10004396) | | |
| | | CDS | 247..429 /product=“A(18,34121,4395,1)$zz$Superinfection |
| | | | Immunity protein & pfam14373” |
| | | CDS | complement(364..546) |
| | | | /product=“orf(18,34121,4395,2)$zz$ORF @ 363-546” |
| | | CDS | 375..581 |
| | | | /product=“orf(18,34121,4395,3)$zz$ORF @ 374-581” |
| | | CDS | complement(578..745) |
| | | | /product=“orf(18,34121,4395,4)$zz$ORF @ 577-745” |
| | | CDS | 593..1672 /product=“A(18,34121,4395,2)$zz$hypothetical |
| | | | protein & Hypo-rule applied” |
| | | CDS | 2021..2194 /product=“orf(18,34121,4395,7)$zz$ORF @ |
| | | | 2020-2194” |
| | | CDS | 2021..2194 /product=“orf(18,34121,4395,7)$zz$ORF @ |
| | | | 2020-2194” |
| | | CDS | complement(2073..2255) |
| | | | /product=“A(18,34121,4395,3)$zz$hypothetical |
| | | | protein & Hypo-rule applied” |
| | | CDS | 2243..3934 |
| | | | /product=“A(18,34121,4395,4)$zz$hypothetical |
| | | | protein & Hypo-rule applied” |
| | | CDS | 2382..2756 |
| | | | /product=“orf(18,34121,4395,10)$zz$ORF @ |
| | | | 2381-2756” |
| | | CDS | complement(2444..2656) |
| | | | /product=“orf(18,34121,4395,11)$zz$ORF @ |
| | | | 2443-2656” |
| | | CDS | complement(2798..3010) |
| | | | /product=“orf(18,34121,4395,12)$zz$ORF @ |
| | | | 2797-3010” |
| | | CDS | complement(3216..3392) |
| | | | /product=“orf(18,34121,4395,13)$zz$ORF @ |
| | | | 3215-3392” |
| | | CDS | complement(3457..3648) |
| | | | /product=“orf(18,34121,4395,14)$zz$ORF @ |
| | | | 3456-3648” |
| | | CDS | 3526..3738 |
| | | | /product=“orf(18,34121,4395,15)$zz$ORF @ |
| | | | 3525-3738” |
| | | CDS | 4392..5438 |
| | | | /product=“A(18,34121,4395,5)$zz$Amidohydrolase & |
| | | | pfam04909” |
| | | CDS | 5977..8838 /product=“−> IscB(2,65)[36.3] \| IscB(374,453) |
| | | | [35.9] : orf(18,34121,4395,17)$zz$ORF @ 5976-8838” |
| | | CDS | 5977..8838 /product=“−> IscB(2,65)[36.3] \| IscB(374,453) |
| | | | [35.9] : orf(18,34121,4395, 17)$zz$ORF @ 5976-8838” |
| | | CDS | complement(6045..6827) |
| | | | /product=“orf(18,34121,4395,18)$zz$ORF @ |
| | | | 6044-6827” |
| | | CDS | complement(6364..6582) |
| | | | /product=“orf(18,34121,4395,19)$zz$ORF @ |
| | | | 6363-6582” |
| | | CDS | complement(6364..6582) |
| | | | /product=“orf(18,34121,4395,19)$zz$ORF @ |
| | | | 6363-6582” |
| | | CDS | 6527..6733 |
| | | | /product=“orf(18,34121,4395,20)$zz$ORF @ |
| | | | 6526-6733” |
| | | CDS | complement(7160..7390) |
| | | | /product=“orf(18,34121,4395,21)$zz$ORF @ |
| | | | 7159-7390” |
| | | CDS | complement(7393..7722) |
| | | | /product=“orf(18,34121,4395,22)$zz$ORF @ |
| | | | 7392-7722” |
| | | CDS | complement(7936..8133) |
| | | | /product=“orf(18,34121,4395,23)$zz$ORF @ |
| | | | 7935-8133” |
| | | DR | 9027..9055 |
| | | DR | 9097..9125 |
| | | DR | 9168..9196 |
| | | CDS | complement(9278..9427) |
| | | | /product=“A(18,34121,4395,7)$zz$hypothetical |
| | | | protein & |
| | | | Hypo-rule applied” |
| 122 | 0315274_10014677 | CDS | complement(2..952) |
| | (Accession | | /product=“−> pfam13231(56,213)[52.1] : |
| | 0315274_10014677) | | A(7,281625,14676,9)$zz$dolichyl-phosphatemannose- |
| | | | protein |
| | | | mannosyltransferase & pfam13231” |
| | | CDS | 2..196 |
| | | | /product=“orf(7,281625,14676,24)$zz$Partial ORF @ |
| | | | 10905-11100” |
| | | CDS | 815..1039 |
| | | | /product=“orf(7,281625,14676,22)$zz$ORF @ |
| | | | 10062-10287” |
| | | CDS | complement(1082..1582) |
| | | | /product=“orf(7,281625,14676,21)$zz$ORF @ |
| | | | 9519-10020” |
| | | CDS | 1118..2485 |
| | | | /product=“−> pfam00171(1,452)[456.0] \| |
| | | | COG1012(1,455)[484.7] : |
| | | | A(7,281625,14676,8)$zz$succinate-semialdehyde |
| | | | dehydrogenase/glutarate-semialdehyde |
| | | | dehydrogenase & |
| | | | KO:K00135” |
| | | CDS | 1398..1673 |
| | | | /product=“orf(7,281625,14676,20)$zz$ORF @ |
| | | | 9428-9704” |
| | | CDS | complement(1471..1884) |
| | | | /product=“orf(7,281625,14676,19)$zz$ORF @ |
| | | | 9217-9631” |
| | | CDS | 2569..2982 /product=“−> pfam01909(2,102)[41.6] \| |
| | | | COG1708(1,134)[40.0]: |
| | | | A(7,281625,14676,7)$zz$hypothetical protein” |
| | | CDS | 2966..3397 /product=“−> pfam01934(7,135)[41.2] \| |
| | | | COG2445(4,142)[53.9]: |
| | | | A(7,281625,14676,6)$zz$uncharacterized protein |
| | | | YutE(UPF0331/DUF86 family) & COG2445” |
| | | CDS | complement(3031..3276) |
| | | | /product=“orf(7,281625,14676,16)$zz$ORF @ |
| | | | 7825-8071” |
| | | CDS | complement(3209..3430) |
| | | | /product=“orf(7,281625,14676,15)$zz$ORF @ |
| | | | 7671-7893” |
| | | POI | 3552..6383 /product=“−> IscB(1,61)[31.8] \| IscB(347,451) |
| | | | [49.3] \| cas9(401,456)[25.0] \| KOON_cd09643(375,584)[29.9] |
| | | | \| TIGR01865(372,584)[29.3] \| pfam13395(405,452) |
| | | | [35.0] \| pfam14239(1,77)[29.9] \| COG1403(339,475)[25.7] : |
| | | | A(7,281625,14676,5)$zz$5-methylcytosine-specific |
| | | | restriction endonuclease McrA & COG1403” |
| | | | 3552..6383 /product=“−> IscB(1,61)[31.8] \| IscB(347,451) |
| | | | [49.3] \| cas9(401,456)[25.0] \| KOON_cd09643(375,584)[29.9] |
| | | | \| TIGR01865(372,584)[29.3] \| pfam13395(405,452) |
| | | | [35.0] \| pfam14239(1,77)[29.9] \| COG1403(339,475)[25.7] : |
| | | | A(7,281625,14676,5)$zz$5-methylcytosine-specific |
| | | | restriction endonuclease McrA & COG1403” |
| | | | complement(3572..3802) |
| | | | /product=“orf(7,281625,14676,14)$zz$ORF @ |
| | | | 7299-7530” |
| | | | complement(3741..3959) |
| | | | /product=“orf(7,281625,14676,13)$zz$ORF @ |
| | | | 7142-7361” |
| | | | 4666..4851 |
| | | | /product=“orf(7,281625,14676,12)$zz$ORF @ |
| | | | 6250-6436” |
| | | | complement(4731..5000) |
| | | | /product=“orf(7,281625,14676,11)$zz$ORF @ |
| | | | 6101-6371” |
| | | | complement(5157..5666) |
| | | | /product=“orf(7,281625,14676,9)$zz$ORF @ |
| | | | 5435-5945” |
| | | | complement(5228..5527) |
| | | | /product=“orf(7,281625,14676,10)$zz$ORF @ |
| | | | 5574-5874” |
| | | | complement(5724..6185) |
| | | | /product=“orf(7,281625,14676,8)$zz$ORF @ |
| | | | 4916-5378” |
| | | | complement(6440..6601) |
| | | | /product=“A(7,281625,14676,4)$zz$hypothetical |
| | | | protein” |
| | | DR | 6594..6630 |
| | | DR | 6664..6700 |
| | | DR | 6738..6774 |
| | | DR | 6807..6843 |
| | | DR | 6878..6914 |
| | | DR | 6949..6985 |
| | | CDS | 7223..8029 |
| | | | /product=“A(7,281625,14676,3)$zz$hypothetical protein” |
| | | CDS | complement(7929..8228) |
| | | | /product=“orf(7,281625,14676,5)$zz$ORF @ 2873-3173” |
| | | CDS | 8041..9048 |
| | | | /product=“−> pfam01136(86,328)[112.4] \| |
| | | | COG0826(1,332)[93.9] : |
| | | | A(7,281625,14676,2)$zz$putative |
| | | | protease & KO:K08303” |
| | | CDS | 9155..10393 |
| | | | /product=“−> pfam09825(19,123)[26.6] \| |
| | | | COG4285(15,123)[26.8] : |
| | | | A(7,281625,14676,1)$zz$glutamine |
| | | | amidotransferase-like uncharacterized protein & |
| | | | COG4285” |
| | | CDS | 9451..9621 |
| | | | /product=“orf(7,281625,14676,3)$zz$ORF @ |
| | | | 1480-1651” |
| | | CDS | complement(9877..10074) |
| | | | /product=“orf(7,281625,14676,2)$zz$ORF @ |
| | | | 1027-1225” |
| | | CDS | 10377..11099 /product=“−> pfam02665(91,241)[36.7] \| |
| | | | COG2181(9,241)[43.9] : |
| | | | A(7,281625,14676,0)$zz$nitrate |
| | | | reductase gamma subunit & COG2181” |
| 123 | 0180435_10002165 | CDS | 103..684 /product=“A(18,35203,2164,0)$zz$hypothetical |
| | (Accession | | protein & Hypo-rule applied” |
| | 0180435_10002165) | | |
| | | CDS | complement(121..327) |
| | | | /product=“orf(18,35203,2164,1)$zz$ORF @ 120-327” |
| | | CDS | complement(394..636) |
| | | | /product=“orf(18,35203,2164,2)$zz$ORF @ 393-636” |
| | | CDS | 807..2579 |
| | | | /product=“−> pfam10412(158,332)[35.1] \| |
| | | | COG3505(364,521)[20.8] : |
| | | | A(18,35203,2164,1)$zz$Type IV |
| | | | secretory pathway, VirD4 component, TraG/TraD |
| | | | family |
| | | | ATPase & COG3505” |
| | | CDS | complement(2226..2402) |
| | | | /product=“orf(18,35203,2164,4)$zz$ORF @ |
| | | | 2225-2402” |
| | | CDS | 2563..3264 /product=“ A(18,35203,2164,2)$zz$hypothetical |
| | | | protein & Hypo-rule applied” |
| | | CDS | 3284..4267 /product=“−> KOON_COG4951(37,199)[92.0] \| |
| | | | PrimPol(7,203)[64.0] \| COG4951(25,224)[92.2] : |
| | | | A(18,35203,2164,3)$zz$hypothetical protein & |
| | | | COG4951” |
| | | CDS | complement(4253..4468) /product=“orf(18,35203,2164,7)$zz$ORF @ |
| | | | 4252-4468” |
| | | CDS | 4287..4664 /product=“orf(18,35203,2164,8)$zz$ORF @ |
| | | | 4286-4664” |
| | | CDS | complement(4455..4631) /product=“orf(18,35203,2164,9)$zz$ORF @ |
| | | | 4454-4631” |
| | | CDS | 4459..5727 /product=“−> pfam00589(164,332)[76.4] \| |
| | | | COG0582(48,349)[86.5] : A(18,35203,2164,4)$zz$Integrase & COG0582” |
| | | CDS | complement(5436..5606) /product=“orf(18,35203,2164,11)$zz$ORF @ |
| | | | 5435-5606” |
| | | CDS | 5970..6140 /product=“orf(18,35203,2164,12)$zz$ORF @ |
| | | | 5969-6140” |
| | | CDS | 6128..6433 /product=“orf(18,35203,2164,13)$zz$ORF @ |
| | | | 6127-6433” |
| | | CDS | 6142..7431 /product=“−> pfam00589(229,401)[102.1] \| |
| | | | pfam14659(118,177)[30.0] \| COG0582(90,417) |
| | | | [103.2] : A(18,35203,2164,5)$zz$Integrase & COG0582” |
| | | CDS | 6644..6862 /product=“orf(18,35203,2164,15)$zz$ORF @ |
| | | | 6643-6862” |
| | | CDS | 6726..6968 /product=“orf(18,35203,2164,16)$zz$ORF @ |
| | | | 6725-6968” |
| | | CDS | complement(6907..7221) /product=“orf(18,35203,2164,17)$zz$ORF @ |
| | | | 6906-7221” |
| | | CDS | 7418..8050 /product=“ A(18,35203,2164,6)$zz$hypothetical |
| | | | protein & Hypo-rule applied” |
| | | CDS | complement(8112..8552) |
| | | | /product=“−> pfam02556(15,143)[41.5] \| |
| | | | COG1952(3,144)[51.3] : |
| | | | A(18,35203,2164,7)$zz$preprotein |
| | | | translocase subunit SecB & KO:K03071” |
| | | CDS | complement(8557..8955) /product=“ A(18,35203,2164,8)$zz$hypothetical |
| | | | protein & Hypo-rule applied” |
| | | CDS | complement(8958..9479) /product=“ A(18,35203,2164,9)$zz$hypothetical |
| | | | protein & Hypo-rule applied” |
| | | CDS | 9354..9524 /product=“orf(18,35203,2164,22)$zz$ORF @ |
| | | | 9353-9524” |
| | | POI | 9927..12782 /product=“−> IscB(3,168)[33.2] \| IscB(348,445) |
| | | | [40.3] \| pfam14239(1,85)[31.9] \| pfam01844(406,449) |
| | | | [24.0] : A(18,35203,2164,10)$zz$RRXRR protein/HNH |
| | | | endonuclease & pfam14239,pfam01844” |
| | | CDS | 9927..12782 /product=“−> IscB(3,168)[33.2] \| IscB(348,445) |
| | | | [40.3] \| pfam14239(1,85)[31.9] \| pfam01844(406,449) |
| | | | [24.0] : A(18,35203,2164,10)$zz$RRXRR protein/HNH |
| | | | endonuclease & pfam14239,pfam01844” |
| | | CDS | 10141..10308 |
| | | | /product=“orf(18,35203,2164,24)$zz$ORF @ |
| | | | 10140-10308” |
| | | CDS | complement(10841..11008) |
| | | | /product=“orf(18,35203,2164,25)$zz$ORF @ |
| | | | 10840-11008” |
| | | CDS | complement(10899..11165) |
| | | | /product=“orf(18,35203,2164,26)$zz$ORF @ |
| | | | 10898-11165” |
| | | CDS | complement(11098..11319) |
| | | | /product=“orf(18,35203,2164,27)$zz$ORF @ |
| | | | 11097-11319” |
| | | CDS | complement(12383..12583) |
| | | | /product=“orf(18,35203,2164,28)$zz$ORF @ 12382-12583” |
| | | DR | 12942..12973 |
| | | CDS | 12985..13311 |
| | | | /product=“orf(18,35203,2164,29)$zz$ORF @ |
| | | | 12984-13311” |
| | | DR | 13009..13040 |
| | | CDS | 13043..13390 |
| | | | /product=“orf(18,35203,2164,30)$zz$ORF @ |
| | | | 13042-13390” |
| | | DR | 13074..13105 |
| | | DR | 13140..13171 |
| | | DR | 13206..13237 |
| | | DR | 13273..13304 |
| | | CDS | 13318..13539 /product=“orf(18,35203,2164,31)$zz$ORF @ |
| | | | 13317-13539” |
| | | CDS | 13332..13598 /product=“orf(18,35203,2164,32)$zz$ORF @ |
| | | | 13331-13598” |
| | | DR | 13340..13371 |
| | | DR | 13407..13438 |
| | | DR | 13475..13506 |
| | | DR | 13540..13571 |
| | | CDS | 13975..14229 |
| | | | /product=“A(18,35203,2164,11)$zz$hypothetical |
| | | | protein & Hypo-rule applied” |
| | | CDS | complement(14089..14370) |
| | | | /product=“orf(18,35203,2164,34)$zz$ORF @ |
| | | | 14088-14370” |
| | | CDS | 14207..14509 |
| | | | /product=“A(18,35203,2164,12)$zz$hypothetical |
| | | | protein & Hypo-rule applied” |
| | | CDS | 14512..14880 |
| | | | /product=“A(18,35203,2164,13)$zz$hypothetical |
| | | | protein & Hypo-rule applied” |
| | | CDS | 14639..14941 |
| | | | /product=“orf(18,35203,2164,37)$zz$ORF @ |
| | | | 14638-14941” |
| | | CDS | complement(14686..14883) |
| | | | /product=“orf(18,35203,2164,38)$zz$ORF @ |
| | | | 14685-14883” |
| | | CDS | 15040..15252 |
| | | | /product=“A(18,35203,2164,14)$zz$hypothetical |
| | | | protein & Hypo-rule applied” |
| | | CDS | 15266..15478 |
| | | | /product=“A(18,35203,2164,15)$zz$hypothetical |
| | | | protein & Hypo-rule applied” |
| | | CDS | complement(15381..15647) |
| | | | /product=“orf(18,35203,2164,41)$zz$ORF @ |
| | | | 15380-15647” |
| | | CDS | 15570..16220 |
| | | | /product=“A(18,35203,2164,16)$zz$hypothetical |
| | | | protein & Hypo-rule applied” |
| | | CDS | complement(16082..16369) |
| | | | /product=“orf(18,35203,2164,43)$zz$ORF @ 16081-16369” |
| | | CDS | 16239..16688 |
| | | | /product=“A(18,35203,2164,17)$zz$hypothetical |
| | | | protein & Hypo-rule applied” |
| | | CDS | complement(16270..16539) |
| | | | /product=“orf(18,35203,2164,45)$zz$ORF @ |
| | | | 16269-16539” |
| | | CDS | 16685..16882 |
| | | | /product=“A(18,35203,2164,18)$zz$hypothetical |
| | | | protein & Hypo-rule applied” |
| | | CDS | 16995..17240 |
| | | | /product=“A(18,35203,2164,19)$zz$hypothetical |
| | | | protein & Hypo-rule applied” |
| | | CDS | complement(17091..17312) |
| | | | /product=“orf(18,35203,2164,47)$zz$ORF @ |
| | | | 17090-17312” |
| | | CDS | 17233..17397 |
| | | | /product=“A(18,35203,2164,20)$zz$hypothetical |
| | | | protein & Hypo-rule applied” |
| | | CDS | 17397..18116 |
| | | | /product=“A(18,35203,2164,21)$zz$hypothetical |
| | | | protein & Hypo-rule applied” |
| | | CDS | complement(17469..17747) |
| | | | /product=“orf(18,35203,2164,50)$zz$ORF @ 17468-17747” |
| | | CDS | complement(18006..18215) |
| | | | /product=“orf(18,35203,2164,51)$zz$ORF @ 18005-18215” |
| | | CDS | complement(18167..18322) |
| | | | /product=“A(18,35203,2164,22)$zz$hypothetical |
| | | | protein & Hypo-rule applied” |
| | | CDS | complement(18623..19369) |
| | | | /product=“−> pfam04452(16,240)[213.3] \| |
| | | | COG1385(1,244)[218.8] : |
| | | | A(18,35203,2164,23)$zz$16S rRNA |
| | | | (uracil1498-N3)-methyltransferase & KO:K09761” |
| | | CDS | 18864..19142 |
| | | | /product=“orf(18,35203,2164,53)$zz$ORF @ |
| | | | 18863-19142” |
| | | CDS | complement(19090..19263) |
| | | | /product=“orf(18,35203,2164,54)$zz$ORF @ |
| | | | 19089-19263” |
| | | CDS | 19182..19472 |
| | | | /product=“orf(18,35203,2164,55)$zz$ORF @ |
| | | | 19181-19472” |
| | | CDS | 19232..19426 |
| | | | /product=“orf(18,35203,2164,56)$zz$ORF @ |
| | | | 19231-19426” |
| | | CDS | complement(19683..19868) |
| | | | /product=“orf(18,35203,2164,57)$zz$ORF @ |
| | | | 19682-19868” |
| | | CDS | 19714..20178 |
| | | | /product=“A(18,35203,2164,24)$zz$hypothetical |
| | | | protein & |
| | | | Hypo-rule applied” |
| 124 | 0172370_10020008 | CDS | 2..493 /product=“orf(16,31122,20007,0)$zz$Partial ORF @ 1-493” |
| | (Accession | | |
| | 0172370_10020008) | | |
| | | CDS | 2..496 /product=“ A(16,31122,20007,0)$zz$hypothetical |
| | | | protein & Hypo-rule applied” |
| | | CDS | complement(2..220) |
| | | | /product=“orf(16,31122,20007,1)$zz$Partial ORF @ 1-220” |
| | | CDS | complement(224..478) |
| | | | /product=“orf(16,31122,20007,2)$zz$ORF @ 223-478” |
| | | CDS | complement(403..579) |
| | | | /product=“orf(16,31122,20007,3)$zz$ORF @ 402-579” |
| | | CDS | 512..835 /product=“A(16,31122,20007,1)$zz$hypothetical |
| | | | protein & Hypo-rule applied” |
| | | CDS | 738..1058 /product=“orf(16,31122,20007,5)$zz$ORF @ 737-1058” |
| | | CDS | 841..1170 /product=“orf(16,31122,20007,6)$zz$ORF @ 840-1170” |
| | | CDS | complement(882..1907) |
| | | | /product=“A(16,31122,20007,2)$zz$L-iditol 2- |
| | | | Dehydrogenase & KO:K00008” |
| | | CDS | 1617..1916 |
| | | | /product=“orf(16,31122,20007,8)$zz$ORF @ |
| | | | 1616-1916” |
| | | CDS | 1955..2161 |
| | | | /product=“A(16,31122,20007,3)$zz$hypothetical |
| | | | protein & Hypo-rule applied” |
| | | CDS | 2175..2267 |
| | | | /product=“A(16,31122,20007,4)$zz$hypothetical |
| | | | protein & Hypo-rule applied” |
| | | POI | 2270..5326 |
| | | | /product=“−> cas9(438,989)[28.0] \| IscB(395,507) |
| | | | [57.7] : |
| | | | A(16,31122,20007,5)$zz$5-methylcytosine-specific |
| | | | restriction endonuclease McrA & COG1403” |
| | | CDS | 2270..5326 |
| | | | /product=“−> cas9(438,989)[28.0] \| IscB(395,507) |
| | | | [57.7] : |
| | | | A(16,31122,20007,5)$zz$5-methylcytosine-specific |
| | | | restriction endonuclease McrA & COG1403” |
| | | CDS | complement(2356..2529) |
| | | | /product=“orf(16,31122,20007,11)$zz$ORF @ |
| | | | 2355-2529” |
| | | CDS | complement(4076..4306) |
| | | | /product=“orf(16,31122,20007,12)$zz$ORF @ |
| | | | 4075-4306” |
| | | CDS | complement(4718..4897) |
| | | | /product=“orf(16,31122,20007,13)$zz$ORF @ |
| | | | 4717-4897” |
| | | DR | 568..5603 |
| | | DR | 5642..5677 |
| | | DR | 5715..5750 |
| | | DR | 5787..5822 |
| | | DR | 5858..5893 |
| | | DR | 5931..5966 |
| | | DR | 6002..6037 |
| | | CDS | /product=“A(16,31122,20007,6)$zz$hypothetical |
| | | | protein & |
| | | | Hypo-rule applied” |
| | | CDS | 6351..6524 |
| | | | /product=“orf(16,31122,20007,15)$zz$ORF @ |
| | | | 6350-6524” |
| | | CDS | complement(6532..6675) |
| | | | /product=“A(16,31122,20007,7)$zz$hypothetical |
| | | | protein & |
| | | | Hypo-rule applied” |
| 125 | OQUW01001492.1 | CDS | 7.41 |
| | (Accession | | |
| | OQUW01001492) | | |
| | | CDS | 73..107 |
| | | CDS | 138..172 |
| | | CDS | 204..238 |
| | | CDS | 270..304 |
| | | CDS | 326..514 |
| | | | /product=“orf(5,10156,1491,0)$zz$ORF @ 325-514” |
| | | CDS | 336..370 |
| | | CDS | 402..436 |
| | | CDS | 418..654 |
| | | | /product=“orf(5,10156,1491,1)$zz$ORF @ 417-654” |
| | | CDS | 468..502 |
| | | CDS | 534..568 |
| | | CDS | 600..634 |
| | | DR | 666..700 |
| | | CDS | 682..861 |
| | | | /product=“orf(5,10156,1491,2)$zz$ORF @ 681-861” |
| | | DR | 732..766 |
| | | DR | 798..832 |
| | | DR | 863..897 |
| | | DR | 907..1212 |
| | | CDS | /product=“orf(5,10156,1491,3)$zz$ORF @ 906-1212” |
| | | DR | 929..963 |
| | | DR | 995..1029 |
| | | CDS | 1154..1345 |
| | | | /product=“orf(5,10156,1491,4)$zz$ORF @ 1153-1345” |
| | | POI | 1227..4403 |
| | | | /product=“−> IscB(2,174)[26.8] \| IscB(407,514) |
| | | | [35.5] : |
| | | | orf(5,10156,1491,5)$zz$ORF @ 1226-4403” |
| | | CDS | 1227..4403 /product=“−> IscB(2,174)[26.8] \| IscB(407,514) |
| | | | [35.5] : |
| | | | orf(5,10156,1491,5)$zz$ORF @ 1226-4403” |
| | | CDS | 1823..2005 |
| | | | /product=“orf(5,10156,1491,6)$zz$ORF @ 1822-2005” |
| | | CDS | complement(1851..2642) |
| | | | /product=“orf(5,10156,1491,7)$zz$ORF @ 1850-2642” |
| | | CDS | complement(2231..2449) |
| | | | /product=“orf(5,10156,1491,8)$zz$ORF @ 2230-2449” |
| | | CDS | 2239..2412 |
| | | | /product=“orf(5,10156,1491,9)$zz$ORF @ 2238-2412” |
| | | CDS | complement(2500..2700) |
| | | | /product=“orf(5,10156,1491,10)$zz$ORF @ |
| | | | 2499-2700” |
| | | CDS | complement(2570..2779) |
| | | | /product=“orf(5,10156,1491,11)$zz$ORF @ |
| | | | 2569-2779” |
| | | CDS | complement(2697..3128) |
| | | | /product=“orf(5,10156,1491,12)$zz$ORF @ |
| | | | 2696-3128” |
| | | CDS | complement(2837..3535) |
| | | | /product=“orf(5,10156,1491,13)$zz$ORF @ |
| | | | 2836-3535” |
| | | CDS | 3283..3543 |
| | | | /product=“orf(5,10156,1491,14)$zz$ORF @ |
| | | | 3282-3543” |
| | | CDS | complement(3540..4463) |
| | | | /product=“orf(5,10156,1491,15)$zz$ORF @ |
| | | | 3539-4463” |
| | | CDS | 3818..4432 |
| | | | /product=“orf(5,10156,1491,16)$zz$ORF @ |
| | | | 3817-4432” |
| | | CDS | complement(3985..4353) |
| | | | /product=“orf(5,10156,1491,17)$zz$ORF @ |
| | | | 3984-4353” |
| | | CDS | complement(4007..4297) |
| | | | /product=“orf(5,10156,1491,18)$zz$ORF @ |
| | | | 4006-4297” |
| | | CDS | complement(4490..4855) |
| | | | /product=“orf(5,10156,1491,19)$zz$ORF @ |
| | | | 4489-4855” |
| | | CDS | 4613..5230 |
| | | | /product=“orf(5,10156,1491,20)$zz$ORF @ |
| | | | 4612-5230” |
| | | CDS | 4780..4956 |
| | | | /product=“orf(5,10156,1491,21)$zz$ORF @ |
| | | | 4779-4956” |
| | | CDS | complement(4963..5460) |
| | | | /product=“orf(5,10156,1491,22)$zz$ORF @ |
| | | | 4962-5460” |
| | | CDS | 5197..6339 |
| | | | /product=“orf(5,10156,1491,23)$zz$ORF @ |
| | | | 5196-6339” |
| | | CDS | complement(5358..5714) |
| | | | /product=“orf(5,10156,1491,24)$zz$ORF @ |
| | | | 5357-5714” |
| | | CDS | complement(5551..6069) |
| | | | /product=“orf(5,10156,1491,25)$zz$ORF @ |
| | | | 5550-6069” |
| | | CDS | 5729..5965 |
| | | | /product=“orf(5,10156,1491,26)$zz$ORF @ |
| | | | 5728-5965” |
| | | CDS | complement(5790..6101) |
| | | | /product=“orf(5,10156,1491,27)$zz$ORF @ |
| | | | 5789-6101” |
| | | CDS | 6323..6520 |
| | | | /product=“orf(5,10156,1491,28)$zz$ORF @ |
| | | | 6322-6520” |
| | | CDS | 6360..6551 |
| | | | /product=“orf(5,10156,1491,29)$zz$ORF @ |
| | | | 6359-6551” |
| | | CDS | 6548..10150 |
| | | | /product=“orf(5,10156,1491,30)$zz$ORF @ |
| | | | 6547-10150” |
| | | CDS | 6598..7536 |
| | | | /product=“orf(5,10156,1491,31)$zz$ORF @ |
| | | | 6597-7536” |
| | | CDS | complement(6851..7570) |
| | | | /product=“orf(5,10156,1491,32)$zz$ORF @ |
| | | | 6850-7570” |
| | | CDS | complement(7279..7560) |
| | | | /product=“orf(5,10156,1491,33)$zz$ORF @ |
| | | | 7278-7560” |
| | | CDS | complement(7601..10312) |
| | | | /product=“orf(5,10156,1491,34)$zz$ORF @ |
| | | | 7600-10312” |
| | | CDS | 8607..8897 |
| | | | /product=“orf(5,10156,1491,35)$zz$ORF @ |
| | | | 8606-8897” |
| | | CDS | complement(8872..9534) |
| | | | /product=“orf(5,10156,1491,36)$zz$ORF @ |
| | | | 8871-9534” |
| | | CDS | 9115..9780 |
| | | | /product=“orf(5,10156,1491,37)$zz$ORF @ |
| | | | 9114-9780” |
| | | CDS | complement(9282..9488) |
| | | | /product=“orf(5,10156,1491,38)$zz$ORF @ |
| | | | 9281-9488” |
| | | CDS | complement(9510..9707) |
| | | | /product=“orf(5,10156,1491,39)$zz$ORF @ |
| | | | 9509-9707” |
| | | CDS | complement(9715..9903) |
| | | | /product=“orf(5,10156,1491,40)$zz$ORF @ |
| | | | 9714-9903” |
| | | CDS | 9963..10133 |
| | | | /product=“orf(5,10156,1491,41)$zz$ORF @ |
| | | | 9962-10133” |
| | | CDS | complement(10557..10826) |
| | | | /product=“orf(5,10156,1491,42)$zz$ORF @ |
| | | | 10556-10826” |
| | | CDS | 10786..11307 |
| | | | /product=“orf(5,10156,1491,43)$zz$ORF @ |
| | | | 10785-11307” |
| | | CDS | complement(10795..11415) |
| | | | /product=“orf(5,10156,1491,44)$zz$ORF @ |
| | | | 10794-11415” |
| | | CDS | 10955..11122 |
| | | | /product=“orf(5,10156,1491,45)$zz$ORF @ |
| | | | 10954-11122” |
| | | CDS | complement(11183..11506) |
| | | | /product=“orf(5,10156,1491,46)$zz$ORF @ |
| | | | 11182-11506” |
| | | CDS | 11346..12485 |
| | | | /product=“orf(5,10156,1491,47)$zz$ORF @ |
| | | | 11345-12485” |
| | | CDS | complement(11556..12452) |
| | | | /product=“orf(5,10156,1491,48)$zz$ORF @ |
| | | | 11555-12452” |
| | | CDS | complement(11857..12111) |
| | | | /product=“orf(5,10156,1491,49)$zz$ORF @ |
| | | | 11856-12111” |
| | | CDS | 12040..13371 |
| | | | /product=“orf(5,10156,1491,50)$zz$ORF @ |
| | | | 12039-13371” |
| | | CDS | complement(12283..12495) |
| | | | /product=“orf(5,10156,1491,51)$zz$ORF @ |
| | | | 12282-12495” |
| | | CDS | complement(12329..13555) |
| | | | /product=“orf(5,10156,1491,52)$zz$ORF @ |
| | | | 12328-13555” |
| | | CDS | 12482..13576 |
| | | | /product=“orf(5,10156,1491,53)$zz$ORF @ |
| | | | 12481-13576” |
| | | CDS | complement(12504..12689) |
| | | | /product=“orf(5,10156,1491,54)$zz$ORF @ |
| | | | 12503-12689” |
| | | CDS | complement(12574..12849) |
| | | | /product=“orf(5,10156,1491,55)$zz$ORF @ |
| | | | 12573-12849” |
| | | CDS | complement(13089..13337) |
| | | | /product=“orf(5,10156,1491,56)$zz$ORF @ |
| | | | 13088-13337” |
| | | CDS | 13161..13409 |
| | | | /product=“orf(5,10156,1491,57)$zz$ORF @ |
| | | | 13160-13409” |
| | | CDS | 13691..13930 |
| | | | /product=“orf(5,10156,1491,58)$zz$ORF @ |
| | | | 13690-13930” |
| | | CDS | 14141..14362 |
| | | | /product=“orf(5,10156,1491,63)$zz$ORF @ |
| | | | 14140-14362” |
| 126 | a0068712_1010247 | CDS | complement(20..1039) |
| | (Accession | | /product=“A(17,32320,10246,3)$zz$Transposase and |
| | a0068712_1010247) | | inactivated derivatives & COG3547” |
| | | CDS | 177..434 |
| | | | /product=“orf(17,32320,10246,16)$zz$ORF @ |
| | | | 5521-5779” |
| | | CDS | 495..890 |
| | | | /product=“orf(17,32320,10246,15)$zz$ORF @ |
| | | | 5065-5461” |
| | | CDS | 917..1237 |
| | | | /product=“orf(17,32320,10246,11)$zz$ORF @ |
| | | | 4718-5039” |
| | | CDS | 942..1121 |
| | | | /product=“orf(17,32320, 10246,13)$zz$ORF @ |
| | | | 4834-5014” |
| | | CDS | complement(967..1224) |
| | | | /product=“orf(17,32320,10246,12)$zz$ORF @ |
| | | | 4731-4989” |
| | | CDS | complement(1221..1439) |
| | | | /product=“orf(17,32320,10246,10)$zz$ORF @ |
| | | | 4516-4735” |
| | | CDS | complement(1234..1563) |
| | | | /product=“orf(17,32320,10246,9)$zz$ORF @ |
| | | | 4392-4722” |
| | | POI | 1597..4407 |
| | | | /product=“−> IscB(2,69)[28.0] \| IscB(342,437) |
| | | | [29.7] : |
| | | | A(17,32320,10246,2)$zz$hypothetical protein” |
| | | CDS | 1597..4407 |
| | | | /product=“−> IscB(2,69)[28.0] \| IscB(342,437) |
| | | | [29.7] : |
| | | | A(17,32320,10246,2)$zz$hypothetical protein” |
| | | CDS | 2115..2462 |
| | | | /product=“orf(17,32320, 10246,7)$zz$ORF @ |
| | | | 3493-3841” |
| | | CDS | complement(2190..2417) |
| | | | /product=“orf(17,32320, 10246,8)$zz$ORF @ |
| | | | 3538-3766” |
| | | CDS | complement(2332..3114) |
| | | | /product=“orf(17,32320,10246,5)$zz$ORF @ |
| | | | 2841-3624” |
| | | CDS | 2738..3055 |
| | | | /product=“orf(17,32320,10246,6)$zz$ORF @ |
| | | | 2900-3218” |
| | | CDS | complement(3553..3987) |
| | | | /product=“orf(17,32320,10246,4)$zz$ORF @ |
| | | | 1968-2403” |
| | | CDS | complement(4099..4566) |
| | | | /product=“orf(17,32320,10246,2)$zz$ORF @ |
| | | | 1389-1857” |
| | | DR | 4591..4626 |
| | | DR | 4661..4696 |
| | | DR | 4733..4768 |
| | | DR | 4804..4839 |
| | | DR | 4875..4910 |
| | | DR | 4945..4980 |
| | | DR | 5015..5050 |
| | | DR | 5086..5121 |
| | | CDS | complement(5394..5579) |
| | | | /product=“orf(17,32320,10246,1)$zz$ORF @ 376-562” |
| | | CDS | 5478..5672 |
| | | | /product=“A(17,32320,10246,1)$zz$hypothetical |
| | | | protein” |
| | | CDS | 5780..5954 |
| | | | /product=“A(17,32320,10246,0)$zz$hypothetical protein” |
| 127 | 0180431_10019360 | CDS | complement(272..655) /product=“−> pfam01934(7,118)[55.2] \| |
| | (Accession | | COG2361(7,126)[61.6]: A(18,35204,19359,6)$zz$Uncharacterized conserved |
| | 0180431_10019360) | | protein, contains HEPN domain & COG2361” |
| | | CDS | complement(648..953) /product=“−> pfam01909(11,101)[43.3] \| |
| | | | COG1669(4,101)[56.2] : A(18,35204,19359,5)$zz$hypothetical |
| | | | protein & KO:K07075” |
| | | CDS | 902..1456 /product=“orf(18,35204,19359,22)$zz$ORF @ 5536-6091” |
| | | CDS | 978..1226 /product=“A(18,35204,19359,4)$zz$hypothetical |
| | | | protein & Hypo-rule applied” |
| | | CDS | complement(1098..1397) /product=“A(18,35204,19359,3)$zz$hypothetical |
| | | | protein & Hypo-rule applied” CDS complement(1271..1522) |
| | | CDS | complement(1271..1522) /product=“orf(18,35204,19359,21)$zz$ORF @ |
| | | | 5470-5722” |
| | | CDS | 1330..1827 /product=“orf(18,35204,19359,20)$zz$ORF @ |
| | | | 5165-5663” |
| | | CDS | 1703..1939 /product=“orf(18,35204,19359,19)$zz$ORF @ |
| | | | 5053-5290” |
| | | DR | 1755..1789 |
| | | DR | 1821..1855 |
| | | DR | 1887..1921 |
| | | DR | 1953..1987 |
| | | DR | 2019..2053 |
| | | DR | 2085..2119 |
| | | DR | 2151..2185 |
| | | DR | 2217..2251 |
| | | DR | 2283..2317 |
| | | DR | 2349..2383 |
| | | DR | 2415..2449 |
| | | DR | 2481..2515 |
| | | CDS | complement(2488..3660) |
| | | | /product=“orf(18,35204,19359,15)$zz$ORF @ |
| | | | 3332-4505” |
| | | CDS | complement(2493..2714) |
| | | | /product=“orf(18,35204,19359,18)$zz$ORF @ 4278-4500” |
| | | POI | 2653..5532 |
| | | | /product=“−> IscB(346,448)[44.9] \| cas9(395,449) |
| | | | [25.9] \| |
| | | | pfam13395(402,446)[29.0] \| COG1403(367,465) |
| | | | [27.1] : |
| | | | A(18,35204,19359,2)$zz$5-methylcytosine-specific |
| | | | restriction endonuclease McrA & COG1403” |
| | | CDS | 2653..5532 |
| | | | /product=“−> IscB(346,448)[44.9] \| cas9(395,449) |
| | | | [25.9] \| |
| | | | pfam13395(402,446)[29.0] \| COG1403(367,465) |
| | | | [27.1] : |
| | | | A(18,35204,19359,2)$zz$5-methylcytosine-specific |
| | | | restriction endonuclease McrA & COG1403” |
| | | CDS | complement(2928..3305) |
| | | | /product=“orf(18,35204,19359,17)$zz$ORF @ |
| | | | 3687-4065” |
| | | CDS | 3083..3364 |
| | | | /product=“orf(18,35204,19359,16)$zz$ORF @ |
| | | | 3628-3910” |
| | | CDS | complement(3519..3944) |
| | | | /product=“orf(18,35204,19359,14)$zz$ORF @ |
| | | | 3048-3474” |
| | | CDS | 3855..4235 |
| | | | /product=“orf(18,35204,19359,13)$zz$ORF @ |
| | | | 2757-3138” |
| | | CDS | 4266..4592 |
| | | | /product=“orf(18,35204,19359,11)$zz$ORF @ |
| | | | 2400-2727” |
| | | CDS | 4370..4585 |
| | | | /product=“orf(18,35204,19359,12)$zz$ORF @ |
| | | | 2407-2623” |
| | | CDS | complement(4519..4788 |
| | | | /product=“orf(18,35204,19359,10)$zz$ORF @ |
| | | | 2204-2474” |
| | | CDS | complement(5050..5334) |
| | | | /product=“orf(18,35204,19359,9)$zz$ORF @ |
| | | | 1658-1943” |
| | | CDS | 5459..5662 |
| | | | /product=“orf(18,35204,19359,7)$zz$ORF @ |
| | | | 1330-1534” |
| | | CDS | complement(5468..5845) |
| | | | /product=“orf(18,35204, 19359,5)$zz$ORF @ |
| | | | 1147-1525” |
| | | CDS | complement(5500..5724) |
| | | | /product=“A(18,35204,19359,1)$zz$hypothetical |
| | | | protein & |
| | | | Hypo-rule applied” |
| | | CDS | 5653..5961 |
| | | | /product=“orf(18,35204,19359,4)$zz$ORF @ |
| | | | 1031-1340” |
| | | CDS | complement(5724..6992) |
| | | | /product=“orf(18,35204,19359,0)$zz$Partial ORF @ |
| | | | 0-1269” |
| | | CDS | 5780..6991 |
| | | | /product=“orf(18,35204,19359,2)$zz$Partial ORF @ |
| | | | 1-1213” |
| | | CDS | complement(5873..6991) |
| | | | /product=“A(18,35204,19359,0)$zz$hypothetical |
| | | | protein & |
| | | | Hypo-rule applied” |
| | | CDS | complement(5876..6991) |
| | | | /product=“orf(18,35204,19359,1)$zz$Partial ORF @ |
| | | | 1-1117” |
| | | CDS | 6610..6990) |
| | | | /product=“orf(18,35204,19359,3)$zz$Partial ORF @ |
| | | | 2-383” |
| 128 | 0194044_10012301 | CDS | complement(3..740) |
| | (Accession | | /product=“−> pfam01738(45,246)[37.6] \| |
| | 0194044_10012301) | | COG0412(32,246)[64.9] : |
| | | | A(16,30309,12300,0)$zz$carboxymethylenebutenolidase & |
| | | | KO:K01061” |
| | | CDS | complement(1192..1998) |
| | | | /product=“A(16,30309,12300,1)$zz$hypothetical |
| | | | protein & |
| | | | Hypo-rule applied” |
| | | CDS | 2175..2375 |
| | | | /product=“orf(16,30309,12300,2)$zz$ORF @ |
| | | | 2174-2375” |
| | | POI | 2388..3788 |
| | | | /product=“−> IscB(1,89)[30.9] \| IscB(347,446) |
| | | | [44.9] \| |
| | | | pfam14239(1,111)[34.7] \| pfam13395(403,450) |
| | | | [27.0] : |
| | | | A(16,30309,12300,2)$zz$RRXRR protein/HNH |
| | | | endonuclease & |
| | | | pfam14239,pfam13395” |
| | | CDS | 2388..3788 |
| | | | /product=“−> IscB(1,89)[30.9] \| IscB(347,446) |
| | | | [44.9] \| |
| | | | pfam14239(1,111)[34.7] \| pfam13395(403,450) |
| | | | [27.0] : |
| | | | A(16,30309,12300,2)$zz$RRXRR protein/HNH |
| | | | endonuclease & |
| | | | pfam14239,pfam13395” |
| | | CDS | complement(2408..2614) |
| | | | /product=“orf(16,30309,12300,4)$zz$ORF @ |
| | | | 2407-2614” |
| | | CDS | 2956..3141 |
| | | | /product=“orf(16,30309,12300,5)$zz$ORF @ |
| | | | 2955-3141” |
| 129 | 0208980_10011278 | CDS | 209..442 |
| | (Accession | | /product=“orf(19,37334,11277,12)$zz$ORF @ |
| | 0208980_10011278) | | 4780-5014” |
| | | CDS | complement(212..406) |
| | | | /product=“orf(19,37334,11277,13)$zz$ORF @ |
| | | | 4816-5011” |
| | | CDS | 646..888 |
| | | | /product=“orf(19,37334,11277,11)$zz$ORF @ |
| | | | 4334-4577” |
| | | CDS | complement(1003..1203) |
| | | | /product=“A(19,37334,11277,3)$zz$hypothetical |
| | | | protein” |
| | | CDS | complement(1312..1479) |
| | | | /product=“orf(19,37334,11277,8)$zz$ORF @ |
| | | | 3743-3911” |
| | | POI | 1544..4408 |
| | | | /product=“−> IscB(1,168)[25.8] \| IscB(350,445) |
| | | | [34.5] : |
| | | | A(19,37334,11277,2)$zz$hypothetical protein” |
| | | CDS | 1544..4408 |
| | | | /product=“−> IscB(1,168)[25.8] \| IscB(350,445) |
| | | | [34.5] : |
| | | | A(19,37334,11277,2)$zz$hypothetical protein” |
| | | CDS | 2007..2282 |
| | | | /product=“orf(19,37334,11277,7)$zz$ORF @ |
| | | | 2940-3216” |
| | | CDS | complement(3293..3535) |
| | | | /product=“orf(19,37334,11277,6)$zz$ORF @ |
| | | | 1687-1930” |
| | | CDS | complement(3635..3847) |
| | | | /product=“orf(19,37334,11277,5)$zz$ORF @ |
| | | | 1375-1588” |
| | | CDS | 3849..4040 |
| | | | /product=“orf(19,37334,11277,4)$zz$ORF @ |
| | | | 1182-1374” |
| | | CDS | complement(4416..4571) |
| | | | /product=“A(19,37334,11277,1)$zz$hypothetical |
| | | | protein” |
| | | CDS | 4583..4786 |
| | | | /product=“orf(19,37334,11277,2)$zz$ORF @ 436-640” |
| | | CDS | complement(4909..5220) |
| | | | /product=“A(19,37334,11277,0)$zz$hypothetical |
| | | | protein” |
| | | CDS | complement(4912..5196) |
| | | | /product=“orf(19,37334,11277,0)$zz$Partial ORF @ |
| | | | 26-311” |
| | | CDS | 4973..5164 |
| | | | /product=“orf(19,37334,11277,1)$zz$ORF @ 58-250” |
| 130 | a0206388_1021286 | CDS | 3..1115 |
| | (Accession | | /product=“−> pfam14238(76,267)[79.4] \| |
| | a0206388_1021286) | | pfam14238(1,122)[69.6] : |
| | | | A(16,30007,1760,1)$zz$protein of |
| | | | unknown function (DUF4340)/protein of unknown |
| | | | function |
| | | | (DUF4340) & pfam14238,pfam14238” |
| | | CDS | 3..1112 |
| | | | /product=“−> pfam14238(76,267)[79.4] \| |
| | | | pfam14238(1,122)[69.6] : |
| | | | orf(16,30007,1760,8)$zz$Partial |
| | | | ORF @ 3303-4413” |
| | | CDS | complement(3..407) |
| | | | /product=“orf(16,30007,1760,12)$zz$Partial ORF @ |
| | | | 4008-4413” |
| | | CDS | complement(41..295) |
| | | | /product=“orf(16,30007,1760,13)$zz$ORF @ |
| | | | 4120-4375” |
| | | CDS | complement(314..934) |
| | | | /product=“orf(16,30007,1760,10)$zz$ORF @ |
| | | | 3481-4102” |
| | | CDS | complement(535..702) |
| | | | /product=“orf(16,30007,1760,11)$zz$ORF @ |
| | | | 3713-3881” |
| | | CDS | complement(783..1025) |
| | | | /product=“orf(16,30007,1760,9)$zz$ORF @ |
| | | | 3390-3633” |
| | | CDS | complement(1253..1504) |
| | | | /product=“orf(16,30007,1760,7)$zz$ORF @ |
| | | | 2911-3163” |
| | | POI | 1373..4291 /product=“−> IscB(21,88)[35.5] \| IscB(372,473) |
| | | | [41.8] \| pfam14239(5,108)[38.3] \| pfam01844(428,472) |
| | | | [22.2] : A(16,30007,1760,0)$zz$RRXRR protein/HNH |
| | | | endonuclease & pfam14239,pfam01844” |
| | | CDS | 1373..4291 /product=“−> IscB(21,88)[35.5] \| IscB(372,473) |
| | | | [41.8] \| pfam14239(5,108)[38.3] \| pfam01844(428,472) |
| | | | [22.2] : A(16,30007,1760,0)$zz$RRXRR protein/HNH |
| | | | endonuclease & pfam14239,pfam01844” |
| | | CDS | complement(2044..2289) |
| | | | /product=“orf(16,30007,1760,6)$zz$ORF @ |
| | | | 2126-2372” |
| | | CDS | complement(2126..3172) |
| | | | /product=“orf(16,30007,1760,4)$zz$ORF @ |
| | | | 1243-2290” |
| | | CDS | 2829..3074 |
| | | | /product=“orf(16,30007,1760,5)$zz$ORF @ |
| | | | 1341-1587” |
| | | CDS | complement(3052..3237) |
| | | | /product=“orf(16,30007,1760,3)$zz$ORF @ |
| | | | 1178-1364” |
| | | CDS | complement(3653..3850) |
| | | | /product=“orf(16,30007,1760,2)$zz$ORF @ 565-763” |
| | | CDS | complement(4138..4413) |
| | | | /product=“orf(16,30007,1760,0)$zz$Partial ORF @ |
| | | | 2-278” |
| 131 | 0315282_10004453 | CDS | complement(352..540) /product=“orf(7,281633,4452,33)$zz$ORF @ 9495-9684” |
| | (Accession | | |
| | 0315282_10004453) | | |
| | | CDS | 439..1209 /product=“orf(7,281633,4452,34)$zz$ORF @ |
| | | | 9582-10353” |
| | | CDS | complement(652..981) |
| | | | /product=“orf(7,281633,4452,35)$zz$ORF @ |
| | | | 9795-10125” |
| | | CDS | complement(1358..3073) |
| | | | /product=“−> pfam00501(23,459)[270.7] \| |
| | | | pfam13193(467,548)[43.8] \| COG0318(8,567) |
| | | | [319.0] : |
| | | | A(7,281633,4452,7)$zz$fatty-acyl-CoA synthase & |
| | | | KO:K00666” |
| | | CDS | 1523..3163 |
| | | | /product=“orf(7,281633,4452,37)$zz$ORF @ |
| | | | 10666-12307” |
| | | CDS | 2067..2306 |
| | | | /product=“orf(7,281633,4452,38)$zz$ORF @ |
| | | | 11210-11450” |
| | | CDS | complement(2268..2921) |
| | | | /product=“orf(7,281633,4452,39)$zz$ORF @ |
| | | | 11411-12065” |
| | | CDS | 3057..3227 |
| | | | /product=“orf(7,281633,4452,40)$zz$ORF @ |
| | | | 12200-12371” |
| | | CDS | complement(3190..3453) |
| | | | /product=“orf(7,281633,4452,41)$zz$ORF @ |
| | | | 12333-12597” |
| | | DR | 3285..3306 |
| | | DR | 3339..3360 |
| | | CDS | complement(3621..4985) |
| | | | /product=“orf(7,281633,4452,42)$zz$ORF @ |
| | | | 12764-14129” |
| | | CDS | complement(3646..4002) |
| | | | /product=“orf(7,281633,4452,43)$zz$ORF @ |
| | | | 12789-13146” |
| | | CDS | 3684..7094 /product=“−> pfam01039(644,1132)[239.2] \| |
| | | | pfam02786(112,327)[183.5] \| pfam00289(1,107) |
| | | | [128.9] \| pfam02785(343,454)[99.1] \| pfam00364(531,598) |
| | | | [54.6] \| COG1038(1,468)[525.7] \| COG4799(610,1135)[457.2] \| |
| | | | COG0511(458,600)[79.5] : |
| | | | A(7,281633,4452,8)$zz$pyruvate |
| | | | carboxylase/acetyl-CoA carboxylase carboxyltransferase component/biotin carboxyl |
| | | | carrier protein & COG1038, COG4799,COG0511” |
| | | CDS | 3961..4182 |
| | | | /product=“orf(7,281633,4452,45)$zz$ORF @ |
| | | | 13104-13326” |
| | | CDS | complement(4382..4735) |
| | | | /product=“orf(7,281633,4452,46)$zz$ORF @ |
| | | | 13525-13879” |
| | | CDS | complement(4992..6674) |
| | | | /product=“orf(7,281633,4452,47)$zz$ORF @ |
| | | | 14135-15818” |
| | | CDS | complement(5471..5704) |
| | | | /product=“orf(7,281633,4452,48)$zz$ORF @ |
| | | | 14614-14848” |
| | | CDS | 5572..5742 |
| | | | /product=“orf(7,281633,4452,49)$zz$ORF @ |
| | | | 14715-14886” |
| | | CDS | 5663..6334 |
| | | | /product=“orf(7,281633,4452,50)$zz$ORF @ |
| | | | 14806-15478” |
| | | CDS | complement(6014..6244) |
| | | | /product=“orf(7,281633,4452,51)$zz$ORF @ |
| | | | 15157-15388” |
| | | CDS | complement(6446..6727) |
| | | | /product=“orf(7,281633,4452,52)$zz$ORF @ |
| | | | 15589-15871” |
| | | CDS | complement(6732..6971) |
| | | | /product=“orf(7,281633,4452,53)$zz$ORF @ |
| | | | 15875-16115” |
| | | CDS | complement(6860..7078) |
| | | | /product=“orf(7,281633,4452,54)$zz$ORF @ |
| | | | 16003-16222” |
| | | CDS | complement(7231..7845) |
| | | | /product=“orf(7,281633,4452,55)$zz$ORF @ |
| | | | 16374-16989” |
| | | CDS | 7306..8553 /product=“−> pfam02515(9,391)[246.8] \| |
| | | | COG1804(1,415)[251.2] : A(7,281633,4452,9)$zz$benzylsuccinate CoAtransferase |
| | | | BbsE subunit/naphthy1-2-methylsuccinate CoA |
| | | | transferase subunit & KO:K07543,KO:K15569” |
| | | CDS | complement(7497..7751) |
| | | | /product=“orf(7,281633,4452,57)$zz$ORF @ |
| | | | 16640-16895” |
| | | CDS | complement(7882..8568) |
| | | | /product=“orf(7,281633,4452,58)$zz$ORF @ |
| | | | 17025-17712” |
| | | CDS | complement(7887..8063) |
| | | | /product=“orf(7,281633,4452,59)$zz$ORF @ |
| | | | 17030-17207” |
| | | CDS | 8118..8345 |
| | | | /product=“orf(7,281633,4452,60)$zz$ORF @ |
| | | | 17261-17489” |
| | | CDS | 8412..9797 |
| | | | /product=“−> pfam02515(6,378)[365.3] \| |
| | | | COG1804(1,402)[323.8] : |
| | | | orf(7,281633,4452,61)$zz$ORF @ |
| | | | 17555-18941” |
| | | CDS | complement(8487..9941) |
| | | | /product=“orf(7,281633,4452,62)$zz$ORF @ |
| | | | 17630-19085” |
| | | CDS | 8636..9478 |
| | | | /product=“orf(7,281633,4452,63)$zz$ORF @ |
| | | | 17779-18622” |
| | | CDS | complement(8702..8962) |
| | | | /product=“orf(7,281633,4452,64)$zz$ORF @ |
| | | | 17845-18106” |
| | | POI | 10001..12910 |
| | | | /product=“−> IscB(1,160)[32.7] \| IscB(382,449) |
| | | | [34.1] \| |
| | | | pfam14239(1,99)[32.9] \| pfam13395(407,455) |
| | | | [32.2] : |
| | | | A(7,281633,4452,11)$zz$RRXRR protein/HNH |
| | | | endonuclease & |
| | | | pfam14239,pfam13395” |
| | | CDS | 10001..12910 |
| | | | /product=“−> IscB(1,160)[32.7] \| IscB(382,449) |
| | | | [34.1] \| |
| | | | pfam14239(1,99)[32.9] \| pfam13395(407,455) |
| | | | [32.2] : |
| | | | A(7,281633,4452,11)$zz$RRXRR protein/HNH |
| | | | endonuclease & |
| | | | pfam14239,pfam13395” |
| | | CDS | complement(10193..12901) |
| | | | /product=“orf(7,281633,4452,66)$zz$ORF @ |
| | | | 19336-22045” |
| | | CDS | 10209..10457 |
| | | | /product=“orf(7,281633,4452,67)$zz$ORF @ |
| | | | 19352-19601” |
| | | CDS | complement(10330..10500) |
| | | | /product=“orf(7,281633,4452,68)$zz$ORF @ |
| | | | 19473-19644” |
| | | CDS | complement(11938..12351) |
| | | | /product=“orf(7,281633,4452,69)$zz$ORF @ |
| | | | 21081-21495” |
| | | CDS | complement(12613..12780) |
| | | | /product=“orf(7,281633,4452,70)$zz$ORF @ |
| | | | 21756-21924” |
| | | CDS | 12661..12963 |
| | | | /product=“orf(7,281633,4452,71)$zz$ORF @ |
| | | | 21804-22107” |
| | | CDS | 13150..13377 |
| | | | /product=“orf(7,281633,4452,72)$zz$ORF @ |
| | | | 22293-22521” |
| | | DR | 13193..13229 |
| | | DR | 13265..13301 |
| | | DR | 13337..13373 |
| | | DR | 13407..13443 |
| | | DR | 13478..13514 |
| | | CDS | complement(13517..13807) |
| | | | /product=“orf(7,281633,4452,73)$zz$ORF @ |
| | | | 22660-22951” |
| | | CDS | 13560..13736 |
| | | | /product=“orf(7,281633,4452,74)$zz$ORF @ |
| | | | 22703-22880” |
| | | CDS | complement(13642..14733) |
| | | | /product=“−> pfam04015(30,227)[149.1] \| |
| | | | pfam00037(303,326)[21.4] \| COG2006(3,287)[196.9] \| |
| | | | COG1145(258,362)[36.4] : |
| | | | A(7,281633,4452,12)$zz$uncharacterized protein |
| | | | (DUF362 family)/ferredoxin & COG2006,COG1145” |
| | | CDS | 13648..14709 |
| | | | /product=“orf(7,281633,4452,76)$zz$ORF @ |
| | | | 22791-23853” |
| | | CDS | 14021..14197 |
| | | | /product=“orf(7,281633,4452,77)$zz$ORF @ |
| | | | 23164-23341” |
| | | CDS | 14297..14755 |
| | | | /product=“orf(7,281633,4452,78)$zz$ORF @ |
| | | | 23440-23899” |
| | | CDS | 15101..15298 |
| | | | /product=“A(7,281633,4452,13)$zz$hypothetical |
| | | | protein |
| | | CDS | complement(15107..15298) |
| | | | /product=“orf(7,281633,4452,81)$zz$Partial ORF @ |
| | | | 24250-24442” |
| 132 | 0172371_10033925 | CDS | 1..330 |
| | (Accession | | /product=“A(16,31096,33924,0)$zz$Forkhead |
| | 0172371_10033925) | | associated |
| | | | (FHA)domain, binds pSer, pThr, pTyr & COG1716” |
| | | CDS | 3..227 |
| | | | /product=“orf(16,31096,33924,0)$zz$Partial ORF @ |
| | | | 2-227 |
| | | CDS | complement(3..182) |
| | | | /product=“orf(16,31096,33924,1)$zz$Partial ORF @ |
| | | | 2-182” |
| | | CDS | 28..327 |
| | | | /product=“orf(16,31096,33924,2)$zz$Partial ORF @ |
| | | | 27-327” |
| | | CDS | 371..742 |
| | | | /product=“A(16,31096,33924,1)$zz$Tautomerase |
| | | | enzyme/Tautomerase enzyme & pfam14552,pfam01361” |
| | | POI | 1236..3893 |
| | | | /product=“−> IscB(1,62)[34.0] \| IscB(344,452) |
| | | | [45.0] : |
| | | | A(16,31096,33924,2)$zz$RRXRR protein/HNH |
| | | | endonuclease & |
| | | | pfam14239,pfam01844” |
| | | CDS | 1236..3893 |
| | | | /product=“−> IscB(1,62)[34.0] \| IscB(344,452) |
| | | | [45.0] : |
| | | | A(16,31096,33924,2)$zz$RRXRR protein/HNH |
| | | | endonuclease & |
| | | | pfam14239,pfam01844” |
| | | CDS | complement(1256..1528) |
| | | | /product=“orf(16,31096,33924,5)$zz$ORF @ |
| | | | 1255-1528” |
| | | CDS | complement(1556..1798) |
| | | | /product=“orf(16,31096,33924,6)$zz$ORF @ |
| | | | 1555-1798” |
| | | CDS | complement(1629..1880) |
| | | | /product=“orf(16,31096,33924,7)$zz$ORF @ |
| | | | 1628-1880” |
| | | CDS | complement(1856..2056) |
| | | | /product=“orf(16,31096,33924,8)$zz$ORF @ |
| | | | 1855-2056” |
| | | CDS | complement(2093..2266) |
| | | | /product=“orf(16,31096,33924,9)$zz$ORF @ |
| | | | 2092-2266” |
| | | CDS | complement(2472..3047) |
| | | | /product=“orf(16,31096,33924,10)$zz$ORF @ |
| | | | 2471-3047” |
| | | CDS | 2971..3198 |
| | | | /product=“orf(16,31096,33924,11)$zz$ORF @ |
| | | | 2970-3198” |
| | | CDS | complement(3239..3568) |
| | | | /product=“orf(16,31096,33924,12)$zz$ORF @ |
| | | | 3238-3568” |
| | | CDS | 3440..3793 |
| | | | /product=“orf(16,31096,33924,13)$zz$ORF @ |
| | | | 3439-3793” |
| | | CDS | complement(3444..3665) |
| | | | /product=“orf(16,31096,33924,14)$zz$ORF @ |
| | | | 3443-3665” |
| | | CDS | 3838..4011 |
| | | | /product=“orf(16,31096,33924,15)$zz$ORF @ |
| | | | 3837-4011” |
| | | DR | 4305..4341 |
| | | DR | 4377..4413 |
| | | DR | 4450..4486 |
| | | CDS | 4503..4685 |
| | | | /product=“orf(16,31096,33924,16)$zz$ORF @ |
| | | | 4502-4685” |
| | | DR | 4522..4558 |
| | | DR | 4594..4630 |
| | | DR | 4667..4703 |
| | | CDS | 4725..4901 |
| | | | /product=“orf(16,31096,33924,17)$zz$ORF @ |
| | | | 4724-4901” |
| | | DR | 4738..4774 |
| | | CDS | complement(4740..4970) |
| | | | /product=“orf(16,31096,33924,18)$zz$ORF @ |
| | | | 4739-4970” |
| | | CDS | complement(4807..5067) |
| | | | /product=“A(16,31096,33924,3)$zz$hypothetical |
| | | | protein & |
| | | | Hypo-rule applied” |
| 133 | 0315295_10011535 | CDS | 3..104 |
| | (Accession | | /product=“A(7,281646,11534,8)$zz$hypothetical |
| | 0315295_10011535) | | protein” |
| | | CDS | complement(284..418) |
| | | | /product=“A(7,281646,11534,7)$zz$hypothetical |
| | | | protein” |
| | | CDS | 743..1297 |
| | | | /product=“−> KOON_icity0084(7,175)[26.1] \| |
| | | | pfam01936(5,174)[93.7] \| COG1432(1,179)[62.3] : |
| | | | A(7,281646,11534,6)$zz$uncharacterized LabA/DUF88 |
| | | | family |
| | | POI | 1487..4351 |
| | | | /product=“−> IscB(3,76)[30.0] \| IscB(354,449) |
| | | | [32.3] \| |
| | | | pfam13395(410,458)[29.0] \| pfam14239(1,93) |
| | | | [27.1] : |
| | | | A(7,281646,11534,5)$zz$HNH endonuclease/RRXRR |
| | | | protein & |
| | | | pfam13395,pfam14239” |
| | | CDS | 1487..4351 |
| | | | /product=“−> IscB(3,76)[30.0] \| IscB(354,449) |
| | | | [32.3] \| |
| | | | pfam13395(410,458)[29.0] \| pfam14239(1,93) |
| | | | [27.1] : |
| | | | A(7,281646,11534,5)$zz$HNH endonuclease/RRXRR |
| | | | protein & |
| | | | pfam13395,pfam14239” |
| | | CDS | 2058..2264 |
| | | | /product=“orf(7,281646,11534,12)$zz$ORF @ |
| | | | 5407-5614” |
| | | CDS | complement(2498..2761) |
| | | | /product=“orf(7,281646,11534,11)$zz$ORF @ |
| | | | 4910-5174” |
| | | CDS | complement(3164..3424) |
| | | | /product=“orf(7,281646,11534,9)$zz$ORF @ |
| | | | 4247-4508” |
| | | CDS | complement(3181..3402) |
| | | | /product=“orf(7,281646,11534,10)$zz$ORF @ |
| | | | 4269-4491” |
| | | CDS | complement(4532..4759) |
| | | | /product=“orf(7,281646,11534,7)$zz$ORF @ |
| | | | 2912-3140” |
| | | DR | 4559..4586 |
| | | DR | 4629..4656 |
| | | DR | 4697..4724 |
| | | DR | 4768..4795 |
| | | CDS | 4812..5003 |
| | | | /product=“orf(7,281646,11534,6)$zz$ORF @ |
| | | | 2668-2860” |
| | | DR | 4839..4866 |
| | | DR | 4910..4937 |
| | | CDS | complement(5134..5511) |
| | | | /product=“A(7,281646,11534,4)$zz$hypothetical |
| | | | protein” |
| | | CDS | 5162..5329 |
| | | | /product=“orf(7,281646,11534,5)$zz$ORF @ |
| | | | 2342-2510” |
| | | CDS | 5596..5898 |
| | | | /product=“A(7,281646,11534,3)$zz$hypothetical |
| | | | protein” |
| | | CDS | 5905..5991 |
| | | | /product=“A(7,281646,11534,2)$zz$hypothetical |
| | | | protein” |
| | | CDS | 6002..6691 |
| | | | /product=“A(7,281646,11534,1)$zz$hypothetical |
| | | | protein” |
| | | CDS | 6787..7110 |
| | | | /product=“orf(7,281646,11534,1)$zz$ORF @ 561-885” |
| | | CDS | 7229..7426 |
| | | | /product=“A(7,281646,11534,0)$zz$hypothetical |
| | | | protein” |

[1225] Various modifications and variations of the described methods, pharmaceutical compositions, and kits of the invention will be apparent to those skilled in the art without departing from the scope and spirit of the invention. Although the invention has been described in connection with specific embodiments, it will be understood that it is capable of further modifications and that the invention as claimed should not be unduly limited to such specific embodiments. Indeed, various modifications of the described modes for carrying out the invention that are obvious to those skilled in the art are intended to be within the scope of the invention. This application is intended to cover any variations, uses, or adaptations of the invention following, in general, the principles of the invention and including such departures from the present disclosure come within known customary practice within the art to which the invention pertains and may be applied to the essential features herein before set forth.

What is claimed is:

1. An engineered nucleic acid targeting system comprising:
a Cas protein comprising a RuvC domain and an HNH domain, wherein the Cas protein is about 950 amino acids or less in size, wherein the Cas protein is capable of forming a complex with a nucleic acid guide molecule, and wherein the nucleic acid guide molecule is capable of sequence-specific binding of a target nucleic acid sequence on a target polynucleotide.

2. The engineered nucleic acid targeting system of claim 1, wherein the Cas protein is less than or equal to 780 amino acids in size.

3. The engineered nucleic acid targeting system of any one of claims 1-2, wherein the Cas protein has no association with Cas1, Cas2, Cas4, or Csn2.

4. The engineered nucleic acid targeting system of any one of claims 1-3, wherein the Cas protein is a Type II Cas protein.

5. The engineered nucleic acid targeting system of claim 4, wherein the Type II Cas protein is a Type II-D Cas protein.

6. The engineered nucleic acid targeting system of any one of claims 1-5, wherein the Cas protein is encoded at least in part or in a whole by polynucleotide sequence that is about 70-100 percent identical to any one of SEQ ID NOs: 31-133 or a portion thereof.

7. The engineered nucleic acid targeting system of any one of claims 1-6, wherein the Cas protein is from or originated from Gammaproteobacteria bacterium AqS3, Deltaproteobacteria bacterium GWF2_42_12, JGI Metagenome: IMG 3300025323, Nitrospirae bacterium RBG_13_39_12, or Nitrospiraceae bacterium isolate UBA9935.

8. The engineered nucleic acid targeting system of any one of claims 1-6, wherein the Cas protein is capable of forming a complex with two or more nucleic guide molecules, wherein each guide molecule is capable of sequence-specific binding of a target nucleic acid sequence, wherein each target sequence is different.

9. The engineered nucleic acid targeting system of claim 8, wherein the target sequences are on the same or are on different target polynucleotides.

10. The engineered nucleic acid targeting system of any one of claims 1-9, wherein the guide molecule or the two or more guide molecules are capable of sequence-specific binding a target sequence in vitro, in situ, ex vivo, or in vivo.

11. The engineered nucleic acid targeting system of any one of claims 1-10, wherein the guide molecule or the two or more guide molecules are capable of sequence-specific binding a target sequence in a prokaryotic cell, eukaryotic cell, a virus, or a combination thereof.

12. The engineered nucleic acid targeting system of any one of claims 1-11, wherein the Cas protein is operably coupled to one or more nuclear localization signals.

13. The engineered nucleic acid targeting system of any one of claims 1-12, wherein the Cas protein is operably coupled to one or more nuclear export signals.

14. The engineered nucleic acid targeting system of any one of claims 1-13, wherein the Cas protein lacks one or more catalytic activates.

15. The engineered nucleic acid targeting system of any one of claims 1-14, wherein the Cas protein lacks nuclease activity.

16. The engineered nucleic acid targeting system of any one of claims 1-16, wherein the Cas protein is a nickase.

17. The engineered nucleic acid targeting system of any one of claims 1-16, wherein the Cas protein is operably coupled to or associated with one or more functional domains.

18. The engineered nucleic acid targeting system of claim 17, wherein the one or more functional domains is/are one or more heterologous functional domains.

19. The engineered nucleic acid targeting system of any one of claims 17-18, wherein the one or more functional domains has one or more activities selected from deaminase activity, methylase activity, demethylase activity, transcription activation activity, transcription repression activity, transcription release factor activity, histone modification activity, nuclease activity, single-strand RNA cleavage activity, double-strand RNA cleavage activity, single-strand DNA cleavage activity, double-strand DNA cleavage activity, nucleic acid binding activity, transposition activity, reverse transcription activity, or a combination thereof.

20. The engineered nucleic acid targeting system of any one of claims 17-19, wherein the one or more functional domains is capable of cleaving the target polynucleotide.

21. The engineered nucleic acid targeting system of any one of claims 17-20, wherein the one or more functional domains is capable of modifying transcription or translation of the target polynucleotide.

22. The engineered nucleic acid targeting system of any one of claims 1-21, further comprising a recombination template.

23. The engineered nucleic acid targeting system of claim 22, wherein the recombination template is operably coupled to, complexed with, or is associated with the Cas protein, the nucleic acid guide molecule, or both.

24. The engineered nucleic acid targeting system of any one of claims 22-23, wherein the recombination template is a homology-directed repair (HDR) recombination template.

25. The engineered nucleic acid targeting system of any one of claims 1-24, wherein the nucleic acid targeting system comprises a tracrRNA.

26. The engineered nucleic acid targeting system of any one of claims 1-25, wherein the Cas protein is a chimeric protein comprising a first polypeptide fragment from a first Cas protein and a second polypeptide fragment from a second Cas protein.

27. The engineered nucleic acid targeting system of any one of claims 1-25, further comprising a deaminase or catalytic domain thereof.

28. The engineered nucleic acid targeting system of claim 27, wherein the deaminase is an adenosine deaminase or a cytidine deaminase.

29. The engineered nucleic acid targeting system of any one of claims 27-28, wherein the deaminase or catalytic domain thereof is operably coupled to, complexed with, or otherwise associated with the Cas protein, a guide molecule, or both or is capable of operably coupling to, complexing with, or otherwise associated with the Cas protein, a guide molecule, or both after delivery to a cell.

30. The engineered nucleic acid targeting system of any one of claims 27-29, wherein the nucleotide deaminase or catalytic domain thereof has been modified to increase its activity against a DNA-RNA heteroduplex, to reduce off-target effects, or both.

31. The engineered nucleic acid targeting system of any one of claims 1-30, further comprising a reverse transcriptase or functional domain thereof, wherein the reverse transcriptase or functional domain thereof is optionally operably coupled to, is capable of complexing with, or is otherwise associated with the Cas protein, the guide molecule, or both.

32. The engineered nucleic acid targeting system of any one of claims 1-31, further comprising one or more nucleic acid guide molecules, wherein each of the one or more nucleic acid guide molecules is capable of capable of forming a complex or is complexed with the Cas protein, and wherein each of the one or more nucleic acid guide molecules is capable of sequence specific binding of a target sequence in a target polynucleotide.

33. The engineered nucleic acid targeting system of any one of claims 1-32, wherein the engineered nucleic acid targeting system is capable of modifying a sequence of the target polynucleotide.

34. The engineered nucleic acid targeting system of claim 33, wherein the modification is
a. insertion of one or more polynucleotides;
b. deletion of one or more polynucleotides;
c. conversion of a C•G base pair to a T•A base pair;
d. conversion of an A•T base pair to a G•C base pair; or
e. a combination thereof.

35. The engineered nucleic acid targeting system of any one of claims 32-34, wherein the modification alters a transcription product of the target polynucleotide, a translation product of the target polynucleotide, or both.

36. The engineered nucleic acid targeting system of any one of claims 32-35, wherein the modification alters transcription, translation, or both of the target polynucleotide.

37. A polynucleotide comprising one or more nucleic acid sequences that encode one or more components of the engineered nucleic acid system of any one of claims 1-36.

38. The polynucleotide of claim 37, wherein the polynucleotide is codon optimized for expression in a eukaryotic cell.

39. The polynucleotide of claim 38, wherein the eukaryotic cell is a human cell or a non-human animal cell.

40. A vector system comprising:
one or more vectors comprising one or more polynucleotides of any one of claims 37-39, and optionally one or more regulatory elements operably coupled to one or more polynucleotides.

41. The vector system of claim 40, wherein the one or more of the one or more vectors are viral vectors.

42. The vector system of claim 41, wherein the viral vector(s) is/are a retroviral vector(s), lentiviral vector(s), adenoviral vector(s), adeno-associated viral vector(s), herpes simplex viral vector(s), or a combination thereof.

43. A delivery composition comprising:
a. an engineered nucleic acid targeting system of any one of claims 1-36;
b. one or more polynucleotides of any one of claims 37-39;
c. one or more vector systems of any one of claims 40-42; or
d. a combination thereof; and
a delivery vehicle, wherein a, b, c, d, or e, are associated with or operably coupled to the delivery vehicle.

44. A cell or progeny thereof comprising:
a. an engineered nucleic acid targeting system of any one of claims 1-36;
b. one or more polynucleotides of any one of claims 37-39;
c. one or more vector systems of any one of claims 40-42;
d. a delivery formulation as in claim 43;
e. one or more polynucleotide modifications produced by an engineered nucleic acid targeting system of any one of claims 1-36; or
f. a combination thereof.

45. The cell or progeny thereof of claim 44, wherein the cell or progeny thereof is a prokaryotic or eukaryotic cell.

46. A tissue, organ, or organism comprising:
a cell or progeny thereof as in any one of claims 44-45 or a population thereof.

47. A pharmaceutical formulation comprising:
a. an engineered nucleic acid targeting system of any one of claims 1-36;
b. one or more polynucleotides of claim 37-39;
c. one or more vector systems of any one of claims 40-42;
d. a delivery formulation as in claim 43;
e. a cell or progeny thereof as in any one of claims 44-45;
f. a tissue, an organ, or an organism as in claim 46; or
g. a combination thereof; and
a pharmaceutically acceptable carrier.

48. A product produced by a cell or progeny thereof as in any one of claims 44-45 or a population thereof, a tissue, organ, or organism as in claim 46, or both.

49. A method of modifying one or more target polynucleotides, the method comprising contacting the one or more target polynucleotides with an engineered nucleic acid targeting system of any one of claims 1 to 36, wherein the engineered nucleic acid targeting system is directed to the one or more target sequences by the guide nucleic acid guide molecule(s) of the engineered nucleic acid targeting system, whereby one or more target polynucleotides is/are modified.

50. The method of claim 49, wherein the modification is
a. insertion of one or more polynucleotides;
b. deletion of one or more polynucleotides;
c. conversion of a C•G base pair to a T•A base pair;
d. conversion of an A•T base pair to a G•C base pair; or
e. a combination thereof.

51. The method of any one of claims 49-50, wherein contacting occurs in vitro, in situ, ex vivo, or in vivo.

52. The method of any one of claims 49-51, wherein contacting occurs within a cell.

53. A modified polynucleotide or modified cell or progeny thereof produced from a method as in any one of claims 49-51.

54. A modified cell or progeny thereof as in claim 53, wherein the cell is a eukaryotic cell or progeny thereof.

55. The modified cell or progeny thereof of claim 54, wherein the cell or progeny thereof is a human cell or progeny thereof or a non-human animal cell or progeny thereof.

56. The modified cell or progeny thereof of claim 54, wherein the cell or progeny thereof is a plant cell.

57. A method of treating and/or preventing a disease, condition, or a symptom thereof in a subject in need thereof, the method comprising:
administering to the subject in need thereof
a. an engineered nucleic acid targeting system of any one of claims 1-36;
b. one or more polynucleotides of claim 37-39;
c. one or more vector systems of any one of claims 40-42;
d. a delivery formulation as in claim 43;
e. a cell or progeny thereof as in any one of claims 44-45;
f. a tissue, an organ, or an organism as in claim 46;
g. a pharmaceutical formulation as in claim 47;
h. a product as in claim 48; or
i. any combination thereof.

58. A method of treating and/or preventing a disease, condition, or a symptom thereof in a subject or cell thereof, the method comprising:
modifying one or more target polynucleotides in or from the subject or cell thereof by contacting the one or more target polynucleotides with an engineered nucleic acid targeting system of any one of claims 1 to 36, wherein the engineered nucleic acid targeting system is directed to the one or more target sequences in one or more target polynucleotides by the guide nucleic acid guide molecule(s) of the engineered nucleic acid targeting system, whereby one or more target polynucleotides is/are modified.

59. The method of claim 58, wherein contacting occurs in vitro, in situ, ex vivo, or in vivo.

60. The method of claim 59, wherein contacting occurs ex vivo in a cell obtained from the subject or progeny thereof and wherein the method further comprises administering cell or obtained from the subject or progeny to the subject after contacting the cell or progeny thereof with the engineered targeting system.

61. A method of generating a modified organism, the method comprising:
modifying one or more target polynucleotides in a cell by a method as in any one of claims 50-52.

62. The method of claim 62, wherein the organism is a non-human animal.

63. The method of claim 62, wherein the organism is a plant.

64. A method of identifying a trait of interest in an organism where the trait of interest is encoded by one or more target polynucleotides, the method comprising:
contacting the organism or a sample therefrom comprising polynucleotides with an engineered nucleic acid targeting system of any one of claims 1-36, wherein the engineered nucleic acid targeting system is directed to the one or more target sequences by the guide nucleic acid guide molecule(s) of the engineered nucleic acid targeting system, whereby one or more target polynucleotides, and thereby the one or more traits, are identified.

65. The method of claim 65, wherein one or more target polynucleotides are modified by the engineered nucleic acid targeting system.

66. The method of any of claims 65-66, wherein the method is performed in vitro, in situ, ex vivo, or in vivo.

67. The method of any of claims 65-67, wherein the organism is a plant, non-human animal, or human.

68. A method of identifying a polynucleotide modifier, the method comprising:
exposing one or more polynucleotides to one or more candidate agents; and
detecting one or more modified polynucleotides by contacting the one or more polynucleotides exposed to one or more candidate agents with an engineered nucleic acid targeting system of any one of claims 1-36, wherein the engineered nucleic acid targeting system is directed to the one or more target sequences of one or more modified target polynucleotides present in the sample by the guide nucleic acid guide molecule(s) of the engineered nucleic acid targeting system, whereby one or more modified target polynucleotides present in the sample are identified.

69. A method of detecting one or more target polynucleotide present in a sample comprising polynucleotides, the method comprising:
contacting, in vitro, one or more target polynucleotides present in the sample with an engineered nucleic acid targeting system of any one of claims 1-36, wherein the engineered nucleic acid targeting system is directed to the one or more target sequences of one or more target polynucleotides present in the sample by the guide nucleic acid guide molecule(s) of the engineered nucleic acid targeting system, whereby one or more target polynucleotides present in the sample are identified.

The application's sequence listing, which the Patent Office published only in electronic form, follows.

SEQUENCE LISTING (140 sequences)

SEQ ID NO: 1 - protein, 15 aa, Artificial Sequence
  Synthetic glycine serine linker
GGGGSGGGGSGGGGS

SEQ ID NO: 2 - protein, 5 aa, Artificial Sequence
  Synthetic sortase recognition sequence
  misc_feature (3)..(3): Xaa can be any naturally occurring amino acid
LPXTG

SEQ ID NO: 3 - protein, 4 aa, Artificial Sequence
  Synthetic
  MISC_FEATURE (4)..(4): Biotin Handle
GGGK

SEQ ID NO: 4 - protein, 7 aa, Simian virus 40
PKKKRKV

SEQ ID NO: 5 - protein, 10 aa, Simian virus 40
PKKKRKVEAS

SEQ ID NO: 6 - protein, 16 aa, Artificial Sequence
  Synthetic nucleoplasmin bipartite NLS
KRPAATKKAGQAKKKK

SEQ ID NO: 7 - protein, 9 aa, Homo sapiens
PAAKRVKLD

SEQ ID NO: 8 - protein, 11 aa, Homo sapiens
RQRRNELKRSP

SEQ ID NO: 9 - protein, 38 aa, Homo sapiens
NQSSNFGPMKGGNFGGRSSGPYGGGGQYFAKPRNQGGY

SEQ ID NO: 10 - protein, 42 aa, Homo sapiens
RMRIZFKNKGKDTAELRRRRVEVSVELRKAKKDEQILKRRNV

SEQ ID NO: 11 - protein, 8 aa, Homo sapiens
VSRKRPRP

SEQ ID NO: 12 - protein, 8 aa, Homo sapiens
PPKKARED

SEQ ID NO: 13 - protein, 8 aa, Homo sapiens
PQPKKKPL

SEQ ID NO: 14 - protein, 12 aa, Mus sp.
SALIKKKKKMAP

SEQ ID NO: 15 - protein, 5 aa, Influenza virus
DRLRR

SEQ ID NO: 16 - protein, 7 aa, Influenza virus
PKQKKRK

SEQ ID NO: 17 - protein, 10 aa, Hepatitis D virus
RKLKKKIKKL

SEQ ID NO: 18 - protein, 10 aa, Mus sp.
REKKKFLKRR

SEQ ID NO: 19 - protein, 20 aa, Homo sapiens
KRKGDEVDGVDEVAKKKSKK

SEQ ID NO: 20 - protein, 17 aa, Homo sapiens
RKCLQAGMNLEARKTKK

SEQ ID NO: 21 - protein, 12 aa, Artificial Sequence
  Synthetic
FWYHKMILVAGC

SEQ ID NO: 22 - protein, 4 aa, Artificial Sequence
  Synthetic
FWYH

SEQ ID NO: 23 - protein, 12 aa, Artificial Sequence
  Synthetic
WYHKREDCSTNQ

SEQ ID NO: 24 - protein, 5 aa, Artificial Sequence
  Synthetic
HKRED

SEQ ID NO: 25 - protein, 9 aa, Artificial Sequence
  Synthetic
VCAGSPTND

SEQ ID NO: 26 - protein, 7 aa, Artificial Sequence
  Synthetic
AEAAAKA

SEQ ID NO: 27 - protein, 15 aa, Artificial Sequence
  Synthetic glycine linker
GGGGGGGGGGGGGGG

SEQ ID NO: 28 - protein, 6 aa, Artificial Sequence
  Synthetic
KCCYSL

SEQ ID NO: 29 - protein, 7 aa, Artificial Sequence
  Synthetic
YEVGHRC

SEQ ID NO: 30 - protein, 8 aa, Artificial Sequence
  Synthetic
GPLGIAGQ

SEQ ID NO: 31 - DNA, 1993 bp, Artificial Sequence
  Synthetic
atgccgcccggattttccttgtcgacgcccgggcgcggccgtatgctcccaactcatggtggccaacgccctggggatagacttgggcggcaaggcagtggggcttgctgtgctggagcgaccgggcaaccgcgtcctgtggtgcggaacggtccacctctccgacaagatcaaggatctctacgaccagcggcggacgctgcgccgggcgcgccggggccgcgggcgctaccgcaagccgaaggtcccccagcgaggcggaggatcggcgggccagacccagtggagcggcttccgctaccggcgcgccaagggcctcaaccagtccctccgaaccaagtgcaagtacgtcgatcccgacacgggcgaggtctgcggaaggaacacggcgaagcgctccaatgtccggcatcttttcctggaggacatcctcggcttcgcgccgttctcggacgtcccggccgactacaagcaggccatccgcgacgtgctggcgtcgagggaaggcatcgcaacgcggaagcagcgcctcgcggccgtcctgagccggatcgacgtggaccggtacctcaagaagcagatcacggagatctgcttcgacgagcgcgggggacgcgcggagttctgccgggaccacatccccgcccgccacacgcagaccgccatccccacgcaggccgtctggctccccccgtccattcggatcaagcaggacttcctcctcaagcatgtccgccaacttgccgccagcgtccgcatcgaccgcatcgtcatcgagcgcgccaacttcgacctccagaagatcgcgaagggagtgatcgacgatcccgcggagtaccagcagggcgcccggtacggcttccgcaacacgcggatggccctcatgcaggagtacggcgcccgttgctgctactgcggcaagagcgtcgtcggcgagaagtggcacgtggaccacatcgacccgcggcgtacgggcgagacgaaccgctggaacaacctcgccatcgcctgcgagaagtgcaaccacaagaaaggcgggcggacgcccctcgatgcgggcatggccttcgccgtggtcggcgagaccgtcgccggccggcgcatccggcgccggctggagcccaagccgctcgccggaagccgtatcaacaagtacatgacgcagaccgaccagggcatccggatcctcaagcgctccctcgccgagatcgtccccggcgcgcccatcgaggagacctacggctacgtgacgagcgcctggcgggacctgtggggcctggagaagggcagggagaagcaggagcaccacaacgacgcgatcgtcatcgcctccctgcgcgaagttgccgccgtccccatcgtcgaggtctcaccgcaggcgatccggcagaccgtcggcggcaagcgcctcttcgacctcaaccccgtccagcgcgcgcgcgacgcgaagtactaccagcgcggcccggtggtcgcggaggtcggcgggatcgcgccggcccaactgcctgcggtcgtggacgagcgcaaacgcaagctgctcgcccgcgagttcgctcgctacggcgtcacgggcaggaagccgctgccgccgccggcgctggatcgcctccccttcaagagcgtccgcctccgcaagcgcgactgcacggatgccaacgtgcgtcggatggcgacgggccaccgcttcaagctcagcaaccccggcggcacgcgcgtcaaccaggccgtcgtcgtgtatctcacgtccgctggcaagcgggcgtcctacgccgtcaagaacacccgggccttcggcccgacggcgccgcccgacgacctcgaccgcgagctgtggcgcttccgcccgggagatgcggtcgccgatcgggacggcggcgcgatcgggcgcgtcgtcaagctcggcagcgacgggacgctgacactcgattccggcaagacacgaaaggcacacacgtgcagcaagggaggtggtcgaatgaccacgagctag

SEQ ID NO: 32 - DNA, 181 bp, Artificial Sequence
  Synthetic
gaggtcagaagcagccagagcgaaggcccccgatggggcctgccagggaacccaacgaaaggcgggacctggccagcagctacgtttgcaggaaaggtcaagacctatgccgggatgtagtgatctcgtctacccagtcccggcctcttggagtctcgacccggaagatcaacgccccagc

SEQ ID NO: 33 - DNA, 30 bp, Artificial Sequence
  Synthetic
attctggcctctcgcgggcgtgggacgatg

SEQ ID NO: 34 - DNA, 28 bp, Artificial Sequence
  Synthetic
cgcgaggcctcgcctgcgtgggacgatc

SEQ ID NO: 35 - DNA, 28 bp, Artificial Sequence
  Synthetic
attctggcctcgcgggcgtgggacgatg

SEQ ID NO: 36 - DNA, 28 bp, Artificial Sequence
  Synthetic
attctgggctcgcgggcgtgggacgatg

SEQ ID NO: 37 - DNA, 1977 bp, Artificial Sequence
  Synthetic
atgcaaggacaaaaacttggtatagatttaggcggtaagcatgtcggtcttgctgttgtaagaacaccgataaacgaggtggcacattactgcactattgaactcagagaagacattaaggataagatggatgagaggaggtctcttcggagggcgaggagaaacaggctctggcatagggaagcgaggtttgacaataggcaattaagggtgaaatgcaaatatattgataaagatacaggcgaaatctgcggagctaatactccaaagaaatccaatgtaaaacatcttctacttgagaatatactcgtcaatcttaaaatagctgatgaatctaaagaggaaatcagaagaagagggctggacagagacacaaacaaaagtgaattacagacaatccttgagaaattttcaataaataccttcctgaaaaaacagattaaagacatcattcttgaaaagggggaagggagggctgtcttttgcagagagcatatcccctttcattatgaacaggttgcaacagaggctgagagtttctggctgtcaaattcaataagggctaaacaggaccagatactctcccgccttaaaagaatagcaaaggattttaagatagatgaggtggttattgaaagggcgaactttgatttgcaaaagctccagagacctgatgagatagaagcacctgaagattacatgaagggtcctaacttcgggcacagaaacaggtttgaggcattgaagcaggaatatggcaaccgatgctgtttctgcggaaagaagggtggagatgaagtaaagctgaagatagggcatctctatccgaaggctaaagatgagataaacaggtgggaaaaccttataactatatgtgaaaaatgtaatgcgaagcagggtaaaaggacaccagaggaggcagggatggaatttgtaattgtaaaggagaaggtttttaatcctgcagcaggaagggtaatacccataaaaagagaactcaagccgaagcccataaatgaatcaaaggttaataaatatatgacccatactgatattggcataaggaggctcaaaagagaaatccagaatatttttggaagcatacctataagagaaacatacggctatatcacatcgtattttagaaataaatgggagcttgaaaaagaacattataatgatgctgtagtcatagcctctgacaaagaagatttgaatataaaacctgtatttaaagatgcagtccctcagacaattaaatcatctatcaagggcgggaaactctttgatacaaatcccctccagtttagtgatggaaagttttaccagaacataacccttataggcagaaaggcagggatgcgttcatcaaaacataaaaggggtcagaggaatatcaggaactatggctcaatttatatggatgagattgaacttataacctcagaatggaagaaaaaggttctctgcgaattaagagataaacttggttatgtaaaaggagataagaataagtcttttaagcctgaggaactgatgaatgcaaatctgcctttcaggactgtaactattgacaaaaggggtgtaggagaatcttcaacccgcttaatcaataacaatgtattccgtgcctcagctgaagtaaatacgcatataatggtctattcaaataatgacggtagaatgaaggcatttgcagtaaaaaatcctaagatatttaaagatgccggactccctcatgattttcaaaaaaagatattcattgtaaaaaagggggatattgttacatggaaaaaaagtgaagatggaattgccgtaacaggcagggtgaccaaatgtttgacaaaaaatggggtaattgatataaaggacatgaataataaaatacactcagggaaaaaccctgtgtatattgaaaagatagtatctcctgaaaggggtgctatttttgagagaaaatctctttctgctctttga

SEQ ID NO: 38 - DNA, 28 bp, Artificial Sequence
  Synthetic
tttcaatctaacacagtggcattaaaac

SEQ ID NO: 39 - DNA, 1836 bp, Artificial Sequence
  Synthetic
ctcaaactcatcgaactcgaactccgggacgacatcaaggacagaatggaagagcggagggcgctgcgcaggcatcgcaggcagcggaaaaggtaccgcaggcccatcgagcctgaccgccagggcggtgtcaggtccgcccccccctaccgcagagcctgcggtcagaaccgcgcatcgaccatgaaatgcatgttcgtcaatcccgtcaccggtgaaaaatgctccctcaatgctccacttaaaaagaacatccgccgcgaactcatggcaatcaccctgaagaattcggacattccaccgggtctgaaagacaatctcgtctcatgtttcgaccggaagcggaacccgcccctcagcacttctgatctcatggcccagctccggaaatggaacgccccctcgcagaccgtccgcatggttgaacaactcctgcacggcaacctgcacggccgctccgactactgccgcgcgcacctgcatgcctgcgccggagactggaccgccgagcggcactccatgcccctttcgaattccgtcctcgcaaaacactcctctctcgtcagccttcttaaaaaactgtcgaagtattacaacatcgacagagtccgcatcgaggattccaacttcgatcctgaattaatacgttccggccgcctgctggattccggggcaggagcggaccggccggatttcctcaagaaaaatactttcaaggccctgcagcacgagtatttaaaccgctgctgctactgcggcagggacggaagcagtacccgtctcgagatcgagcacgtgatcccgaaatccctcggcggttccgacacctgggagaatctcgttctggcctgcggcgattgcaactcccggaagggctggcggacccccgaaaccgccggtatggattttcacgtcctggaaggtgtgattgtcgccggcgtgccgcgccgggtttctctggaaccggtccctttcgagcgctcccggacccgcggattcatggataagaccgatcccggcaaacgaaccgtcaggaaacacctccggcaggtttttccgctggcggaattcgagttcgacttcggctacaggacttcatatctgagaaacaagtggaactgggaaaaatcgcgctgctgcgacgctgctgtgatcgcggccatggccggcggcgagataccaggcgctccccccaccattccactggaaaaatcagttttgaaatttaattccggcggcggaaaactgttcgatacatttcccgtttcaaaaaccggcgccggctacgtgcagggccgaaccctcataagccgcgacggcaggtttgccagattcacgtggggggaaattaaaagggtggcttcaccagggaaaaagcgcatccttgaaaaacttaaggagaaagccggtgtgggcgccgtatccgacgcagaccttatcccggacgaccttttagagaccctgcccttccgccgtgttaccctcaagagaaaggatgtcggcgcttccgccgtccgcgggatcaacggcaattatttcaaggcggagcaccccaactggggaacagccgtttatttggataaaaacgggaagaaaaatttcttcatgattaagaacgcaagggtatttggaaaaacacagcctcccgaagattttgccaggctccttttcatcatcaggaagggagaccgtgtgaagttcacttacaagaacaggcagcggattgaaaaagtttatgcgaacttctcgaacgggagccttaaactgcttacggccgatggcgagacaatcatgaaaagcgctaaatcctgcgtccccgccggtggacgggacata

SEQ ID NO: 40 - DNA, 1938 bp, Artificial Sequence
  Synthetic
atggcaaacgtccttgggatagacctgggcggcaaggcggtggggctggccatcgtccagcagccggagaatcaggttctctggtgcggcaccgttcacctctcggatcggatcaaggacctctacgaccaacgccgcgttctgcgccgcgcccggcgctcccgcgtccgctaccgcaagccgaaggtccagcagcgcggcggcggctccggcggccggggaaccgaaggcgccacctacttctacaagcgtgcgaagggcctcaatcagtcgctccgcagaaagtgcaagtacgtggaccccaacaccggcgaagtctgcggccgcaacacgcccaagcgaggcaacgtccgccacctgctgatcgaggacatcctgagcaactactcgcccttcgccacagtcgatgcaacgctgaagcaagcgattcgcgacatcctcgccagtcgcgaaggaatcactcgccgccaggagcggctcaagaatgttctcgacctcatcgacatcaacgccgacctgaagaagcagatcaccgatatcttgtttggcacaggcgagcgccgctgtgagttctgccgcgaccatatcctctcccaccacgagcagacgcagacgccggccgatccccgttggctgccgccttcgatccggctcaagcaggagtttctcctcaagcaggttcgccgcctcgcgcaccgttaccgcattgaccgcgtcgtcatcgagcgggcaaggttcgaccttcagaagatcgcccgcggcgtcatcgacgacccggccgagtaccagcagggccaccgatacggcttccggaacgtccgggcggccctctttcaggagttcagcggccactgctgctattgcgggcggagcgtcattgacaagaagtggcacgttgaccatgtggacccgcgccgcaagacgggggcggggcggtgggacaacctggccgtcgcctgcgagtcctgcaaccacacgaagggcggccggtcgccgcaggaagcggggatggcgttcgcgaccatcccggcggtcgtcgcggggcgccgcatccgccggtcgctcgcgccaaaaccgattgaaggcgcccgcatccacaagtatatgacgcagacggaccagggcatccgaatcctcaagcgcgagctgcgggaaatccttggggccgtcgagatcgacgagacgttcggatacgtcacgagcgcctggcgagacctgtgggagttacccaaggggcgcgagacgaacgaacaccacaacgacgccatcgtgatcgcggccaacctcacgccggatgcccgccccaagctcgacggcgagccggaagccgtccggcagttgatcggcggcaagcgactgtacgatcagaaccccgtttcccggcggggcgacgggaagtactaccagcgtcagccggtgctggccgagcaaggcggcatcacgcgccggcagcttcgccaagtggtggacgagcgcaggcgacgtatcctcgccgccgcgttcgagtaccacggcgtcaagggcaacaagacgctgccgcccgccgcgctccagcagttgccattcaagagcgtgcggctgcgcaaggccgactgcaccgatgagaacacccgcgctctcccggcccggaaccgccggcatcgctacaagatctccaacacaggcggaacgcgcgtgaacgaggcagtggccgtgtatcaaacgaccggcggtcgccgggcctgctacgccgtgaagaaccggcgcgtcttcggacggacgccgcccccggaggacctcgcgaaggaactgtggcgcgtgcggcccggcgatacgctccacgattcgtcgggcgacgtgctgggcgccgtcgtgaagctgggaagcaacgggacgctgacgctggatagcgggagaacccgaatggctcaccgatgccacagggcgatcagcccctga

SEQ ID NO: 41 - DNA, 181 bp, Artificial Sequence
  Synthetic
cgagttcggaagcagcctcagcgatcccgagagatcgggagccagggaacccaacgaaaggcgggacctggccagaagctacgtttgcaggacagctgaagacctatgccgggatgtagtgatctcgtctacccagtcccggccccttggagtctcggcccacaagatcaacgccccagcg

SEQ ID NO: 42 - DNA, 28 bp, Artificial Sequence
  Synthetic
aacgctgacccgcgtgcgtgggagtgat

SEQ ID NO: 43 - DNA, 28 bp, Artificial Sequence
  Synthetic
attccggactcgcgtgcgtgggagtgat

SEQ ID NO: 44 - DNA, 2019 bp, Artificial Sequence
  Synthetic
gtgaatacggaaacgcgagagcaggtgttggggattgacttcggcccgaagcacgtgggaattgctctcgtggcgaggggggcctcgtcggaggaagtcctcttcgtcgcggaggtgcggctgagggaccgcaagtcgctgctggccgaccggcgggcgctgcggcgcgggcggcgaggcaggaagcgctaccgccagcccaagattccacagcggggcggtggcgcgacgtcgcaaagcggcgaggagagcgagagggggcgcgccgcagccccggagtatcgtcgcgccacagggctcaacacagggcgacgacgctgcaagtttgtcgacccccagacgggtgaaatatgcgggtggaatacgccccgcaaggccaacgtccgcgacctcctgctgtggaacatctgccgccaccttccggtgtctgtctccgagcaggcggggttcctcgcttacgtcaaccagacgaacctccaccgcgcggagatactgggtgctctgccggcggaagagcaggccccgctggaggccgtgttctcgcaacagcggcggccgaaagacgagcggctgaaggaccggctacgaaggctcggcgttgaccggcacctgcgctcgcaggtcacggacatcgttggcatcacctctcgccggccgctcagcgggcggctgtctttctgccgcgagcatttcctgcgccaccacgagcagagccgcgttccccggcccagcgtgtggctcccgaacactgttgagatgaagcaagcggatgtgctaaaggtctgccggcaggaggtcgcgccgcgctggcgtgttgactgcatagtgctagagcgggccaacttcgacttgcagcttctccggcagcagaccgccatcgaatggtcggtggaggactggcagcgcggcccgcggtggggctaccgcaacaccttcgaggcgaagaagcaggagcaggggaaccgctgcgcctactgcggcagcaagccgacggcgaagaaccggctgaggctggaactggagcacgtcattccaggtgggggcgacacgtgggagaacctggtgctaagctgccggaagtgcaacgagggcaagggtaatcgcagccctgcgcaggccggcatgcgcttctggacggacaccgagacgggagagacgctctccccggcgccgctcggcgccgcgcacgtttcccgctacatgacccagacggaccaggggtggcgtcgccttcaggccgcgctacagcaggtcttcccccaggccgcagtcgagcacacctgggggtacgtgacgagcttctaccgtaaccgctggaacctccccaagaagcacttcgtggacgcggccgtcatcgccagctcgcacgagcttgagcgccccgtgtccgtgcccgaacagccccagcggtttgctccgacatccggcggcaagcagctcttcgacacgaaccccctctcaaagcggccggaggggcgcttcgctcagagcaaggcgattgtgtgcgagcaggggacgctcgccttcaaagatgtcgccaaggtagagaacccgcgcaagcgcgccacgcttcagcgcgtcgcggatgaggccaccgcagcagcaaaggcgcggggcgaaaccccgcccaccgcgttcaccgctgaaatgctgccgaagataccattcaagtctgtgcgccttgccaagcaggacgctagcgacaccaacacacgccgactcggccggcattggttcaaggtcgcaagcgccgtgaatatcgcgaccatcgtctaccagctcgacgggaaggtttgcatgcaactccaacgcaaccccgcggtcttccgtcatgaccctggcttgccgcagggggcgcgcgttgtcgccaccttccgcaagggcgacctggtggagtgtgacgcgggccgcggtcgggtaacgaagaaccacagtaactgcactctcaccgtcgaactgctggacagtggcaaggaggtgacgaggctggcgaagtcgttcaggccgcggcatggctag

SEQ ID NO: 45 - DNA, 187 bp, Artificial Sequence
  Synthetic
gaagggcgaaagcagcccagccaagtctccgcccatggcggagcacgggaaaccggtggggaaacccggccggccaccgtaaggaggcacgtttggggaacaggtaggggtaaccctgagtgcaacctggggtgcaccttcagctccaggctctgcaaggctcggcccagaggattaacgccctaat

SEQ ID NO: 46 - DNA, 28 bp, Artificial Sequence
  Synthetic
tttcgccctcgcattggtggacagcacg

SEQ ID NO: 47 - DNA, 28 bp, Artificial Sequence
  Synthetic
tttcgccctcgcattggtggacagcacc

SEQ ID NO: 48 - DNA, 28 bp, Artificial Sequence
  Synthetic
tttcgccctcgcattggtggacagcact

SEQ ID NO: 49 - DNA, 1920 bp, Artificial Sequence
  Synthetic
atggagaacgtcctcgggatagaccttggtgggaaagcggtcgggctggcggtagtcgagcagccctccaaccgcgtccagtggtgcgggaccgtaagactctcggacaagatcaaggacctctacgaccttcggcgaaccctccgccgcgccaggcgaagccgggtgcgttatcgaaagcccaaggtcgccgaaagaggaggcggggccggggggaaaggcgaggagggggcgacctacttctaccggaaagccaaagggctgaatcagtcgctgcggacaaagtgcaagtacgtcgatccccagacgggagaagtctgtggaaagaacacgccccagatggccaatgtccgccacctcctcctggaggacatactcggctttgcgccctttgccccggtgggggaggactgcaagcaggccatccgagacatcctggcctcgcaggacggcgacgcgcgacgccgggaacgcctcgagaacgtcctggggctgatcgatctgtccgaatacctcgaggagcagatcaaggacatcatcttcgggaagggcgacgggcgtgcccagttctgccgctcgcacatcctgggccaccactcgcagaccgagactcccaagcaggccgcgtggttgccgccatcgctgaagctcaagcaggatttcatcctcaaggtcatccgcgagcggggcaagccttgccgcatcgatcgaataataatcgagcgggcgaacttcgacctccagaagatcgcggcgggggtgatcgaagacccgcgcgagtaccagcaagggtatcgctacggatttcgcaatacccgtgcggcgctgatgcaggaatacggggcgaggtgttgttattgcggtaagagcgtggcggggcagaaatggcacatcgaccacgtcgatccgcgcaggacgggcgagatcaaccgctgggacaacctcgccatagcctgtgaaaagtgcaatcacagcaaaggcgggaagacccccaaggacgcgggcatgcgcttcgcggtggtgacggagaaggtcgctgggcgcaagatacgccgctccctggccccgaagcccgtcgagggcacccgcattcacaagtacatgacccagaccgaccagggcataaacatgctaaagaacgctctgagggaaatcttccccgctgctcccatcgaggagaccttcggctacgagaccgccgcctggcgggacctgtgggggctggagaagggcaaggaaaaaggcgagcaccacaacgatgccatcgtcatcgcttcagcccgtgtcccggaagggattcccaaggcagacgcgcagcccgaggcaatatcgcagaccgttggtgggaagcgcctcttcgatctcaacccggtctcccgctcgcccaacgggcgttactaccagagaacgccggttttggccgaatccggggggataactcccaggcaactccccgccgtggtggaccagcgcaagcggaagctcctggcacgcgagttcgaacgctacgggatcgaggggaacaagaaactcccggaccgggcccgggagcgcctgcccttcaagagcgtcttgctgctcaagcgggactgcgcggacgggaatgtgcgccggatgagaaccggtcattccttcaaggtctccaatgccggcggaaccagggtcaacgaagcggtaatcgtctacgagaaccttttggggaaactatcctgttacccgctcaagaacccccgggccttcgggcctacgagaccaccggatgatttcaagagggaattgttccgattccgtgcaggcgacagaatcgttgacctcaacggaaggtccctcggggaggttgtggagtttgggagcgacggcaggttgacaacagacaaaggacataacacaatagcacacaggtgcagacgggggagttag

SEQ ID NO: 50 - DNA, 183 bp, Artificial Sequence
  Synthetic
cgaggtcgaaagcagccacagcgaaggccccgcaagggcgcctgccggagaatccaacgaaaggcggaatccggccacgagctacgtttgcagggaagcctaagacctatgccgggatgtagtgactcgtctacccagccccggcctcttggagtctcggcccggaagatcaacgccctcccc

SEQ ID NO: 51 - DNA, 28 bp, Artificial Sequence
  Synthetic
ctgcgagcctcgcgagcatgggattgat

SEQ ID NO: 52 - DNA, 28 bp, Artificial Sequence
  Synthetic
atttcggcctcgcgagcgtgggattgat

SEQ ID NO: 53 - DNA, 28 bp, Artificial Sequence
  Synthetic
atttcggcctcgcgagcgtgggattgat

SEQ ID NO: 54 - DNA, 28 bp, Artificial Sequence
  Synthetic
atttcggcctcgcgagcatgggattgat

SEQ ID NO: 55 - DNA, 1470 bp, Artificial Sequence
  Synthetic
ttgcatcataagcagctgacagtagaagctgaaagttcgtggctatccaacagcatcagggcaaaacaagaccaagtcatatcacatcttgagaagttagcgaaacatttttcaataagtgaagtgattctggaaagagcaaactttgaccttcagaagatacagggaatgattgagaatcctgatgattatatgcatgggttcaatttcggtcacagaaacaggtttgaagctttgaagcaggaatacggaaatcgttgctgcttctgtgggcaaacaggtggcgaaaaagtaaggcttcaaatcggacatgtttatccgaaagcaaaggaagaaattaaccgatgggaaaatctcattactatttgtgagaaatgcaacatcaaacaaggcggaagaacacctgacgaagcagggatgaagtttgcagtagtaaaagagaaagtcttcaatccagtacttggacaaataataactgcatcaagaacgctttcaccgaaaccactcagtgagtctaaaataaataaatacatgacacatacggatataggaataagaaaactaaagaagcaaattaattcaatgtttggagatatacctataaaagaaacctttggttatataacatcttattatcgaaatcactggggattggataaagagcattacaatgatgcgatagttgtcgcatctgaaaaaggtgatttaaacaagaagcctcaatccccatatataaagcccgttgttatcaatccgaagattaaaggcgagaaacttttcgacaccaatcctctacaacataagaatggcaagttctatcaacaaatatctttgataggcagaaaaaagagtgctcgttcttcaaatcataaagctggacagagaaaaataagggcatataatgcattacggattgaccagattgagttgattatgtctgcatggaaacggaaaatacttgatgagttaagagagaaactcggctatatgaagggagacaggaaaaaatacttcaagcccgatgacatcataaatgcaaatctgccattcagaactgtgaccatagaaaaactaggagttggcgagagtgcggtaagaaaaatcaagaataatgtttttcgtgtcgcttctgatgtcaatacccatataatggtttactccacgcctgactcaaaaatgaaagcgattcctatcaagaatacaagaatatttaaagatgttgacatgcatagagatttctccaagaaacttttcatagtaaaaaaaggagatgtagtctgctggaaaaacaaaggagtcgagattacaggtaaggtaatgaaatgcttgacaaagggtgcgagcattgatataaaggatatggattctgacaagacctacagcgctaagaaccctgtttgtattcagtcggttcgttcctctgaaggtaaattgctctttgaaaatagaaactcaagattgaaaaccgcc

SEQ ID NO: 56 - DNA, 29 bp, Artificial Sequence
  Synthetic
tttcaatctcacattagtggcatttaaag

SEQ ID NO: 57 - DNA, 1920 bp, Artificial Sequence
  Synthetic
atgccgaacgtcatggggatagatttgggcggcaaggccgtcgggctggctatcgtccagcagccggagaatcgcactctatggtgcggaacaatccatttgtcggacaagatcaaggacctctacgatctccgccgtacgctccgccgagcccgccgcagccgcgtgagataccgtaagcccaaagtcccccagcgcggcggcgggtccgccggccaatcgcaatggagcggctactcttaccgccgcgccaaaggactgaaccaatcccttcggaccaagtgcaagcacgtcgattctgaaaccggcgaggtctgcgacaagaacaccccgaagaacgccaacgtccgccacctgttcctcgacgacatccttagctacgccccatttcaagccgtgcccgatgaccacaagcagtccatccgcgaggtcctcaccagccgcgatggtatagccagccggcgcgagcgtctggcggatctccttgaccggctcaccgtcaaagcctatctcaagaagcagataaaggacatctgtttcaatgacctcgacggccgcgcggagttctgcagcgaccacatcctttgccaccacgcccagactgacgtgcccaaacagtcggcctggctgccgccctcgatccgcctcaagcaggatttcctcctgaagaacatccgcgaactggcccagcttttccacatcgaccgcatcgttctagagcgggccaacttcgacctccagaagatcgccgccggcgtgattgaagacccatcagagtaccagcagggcttccggttcggttcccgcaacacgcggatggccctgatgcaggaatacggcgcgcgttgctgctactgcggccagagcgtcgccggccagaaatggcatgttgaccacatcgacccgcgccgcgctggggaggccaaccggtgggacaacctggccatcgcctgtgaaaagtgcaaccaccaaaagggaggccgcacgccgaaggacgccgggatggccttcgccgtcatctccgagagagtcgccgggcggatgatacgccgctccctggagccccaccccatcgagggaacccggatcaacaagtacatgacccagaccgaccagggcatccgcatgctgaaaaacgccctccgggagatcttgcccggcgcagagatcgaggagactttcggctacgtcaccagcgcctggcgggagttctggggcctcgaaaagggcaaggaaaaacaagagcaccacaacgacgccattgtcatcgccgccgaccgccgcggcggcgcgaagcccatcgtcgaaataattccactggccaatcgccagatcgtgggcggccgccgcctgttcgaccttaaccccgttcagcgcgcgcccgacggccggcattatcagcggacccccgtcgcggccgaggtagggggagtctcaccgagccagctaaaggccgtggtggaccctcgaaagcgggaacttctcacccgcgaattcgcccatcacggcgttaccggcaataagtcgctcccgccggccgcgctggaacgcctgccgttcaccagcgtccggctgcgaaagccggactgcaccgacaccaacgtccgacagatcccatccggccaccgctttaagttgagtaattccggcggcacgcgcgtcaacgaggcggccgtcgtctaccgcacaacggccggcaaggtggcttcctatgtcgtgaagaaccgcttggcctttgggcagacgccccttcctggagatttcgagagggaactttggcgtgcaaaaccgggcgacgtattgtacgatgctggcggaaaccccttcggaagcgttacgaagatcggcagcaacggaaccatgaccttggatacaggaaaatcaagaatggcacatcggtgccggaagggaggaacatag

SEQ ID NO: 58 - DNA, 29 bp, Artificial Sequence
  Synthetic
cgcgaggcctcccacgcacgggttgaagc

SEQ ID NO: 59 - DNA, 29 bp, Artificial Sequence
  Synthetic
atcttggcctcgcacgcacgggacgaagg

SEQ ID NO: 60 - DNA, 29 bp, Artificial Sequence
  Synthetic
attttggcctcgcacgcacgggatgaagg

SEQ ID NO: 61 - DNA, 29 bp, Artificial Sequence
  Synthetic
attttggcctcgcaggcacgggatgaagg

SEQ ID NO: 62 - DNA, 29 bp, Artificial Sequence
  Synthetic
attttggccttgcaggcacgggatgaagt

SEQ ID NO: 63 - DNA, 1155 bp, Artificial Sequence
  Synthetic
atggaaaacgtgctggggatagatctgggcgggaagttcgtcgggctggcagtcgtcaggcagccggataatcacgtcctatggtgcggtaccctgcacctgtctgacaagatcaaggacctctacgacctccgccgtgtcctccgcagggccagacgctccagggtccgctatcgcaagccaaaggtgccccagcgtggaggcggcgcctcaggcagcggggcggacggagctacctatttctaccgtcgggccaaggggctcaaccagtccctacggaccaagtgcaagcacgtagacccacagaccggggaagtctgcggcaagaacaccccccgtgccgccaatgtccggcatttgctgctggaggacatcctgggcttcgagcctttcaaggccgtccccgaatcctaccgccaggccctgctggaagtgttggcggcaacacaaggcacgccccgaaagcagcagcggcttaagaacatccttgcccaggtggacgtggacagctatctcaagaagcaggtgatcgacatcatctgcaacgacctcgatggccgctgcgagttctgccgggaccacctgctggcccaccaccagcagaccgccgtcccgaggcaggcgtactggctgcccccatcgatcaagctcaaacaggacttcctgctcaagcatgtccgccagcttgcccgccgcttcgacatcgacaggatcgtcatcgagcgagccaggttcgacctccagaagattgccgccggggttattgacgatccaacggagtaccagcagggcttccgcttcgagttccgcaacacccgcgccgcactcctacaggagtacgacgggcggtgctgctactgcggcaaggaagttttcggtcagaagtggcacgttgaccacgtgcagccccgccgacaggagcaagtcgatcgctgggacaacctggctatcgcttgcgagaagtgtaaccatctcaagggcgggcgcgatccagaagaagccgggatgtcctttgccgtggtgactgtcaaggcagccggcaggcccatcaagcggtcattagcccccaggcccatcgagggcagccgcatccacaagtacatgacccagaccgatcagggcatccggatgctgaagagcgccctgggggagctt

SEQ ID NO: 64 - DNA, 2310 bp, Artificial Sequence
  Synthetic
gtggtcgtgaggccacaaggcaagctggaccatattcctatccctaaacctgagcgaggaggcattacaattcggtccgagaacgtgctgggaattgacttcgggccggagcacgtggggctggccttggtgcggcgggagccggccggggagcaggtgctctacgcggcttccatcaccttgcgcgacctgtccccggtgatgaaggagcgccgcgctctcaggcggcagcggcgctctgagtcatggtaccgccagcccagggtcccacagcggggcgggggcagcgcgcggggagccggggcccaggaagatgagcaggccgtcgagggtgtgccggaagaggaggaggatcgaagtcgtgcgcggtccgctcccgagtaccggcgggcgcagggatgcaataagcccaagcgaaagtgcaagtatgttgaccctaagaccggcgaggtctgcggggccaacacccctcgcaaggagaaggttcgcgatctgctgctgtgggacatctgccagcacctgccggtggaacccgagcagcgccttgccatcctcagctacgtcaatcaggtcaatattgtccgcccggaagtgctggcgtgccttgccctggaagagcgggccttgctggaaaaccatcgagctctggcccgcgcttcgaagagcaagcctctcccccagcttctctgcgaactgaagatcaagaaacagttacaatcccagattctggcgatcgccagcggagaccccgaacgcaaagccgccgacctcaaggggcggatgcccttctgccgcaagcattttctccttcaccacgaacagaccaggattcccaagccctccgcctggcttccgcccagtatccggtgtcggcacgccgacctggagagggtctgccgggaggaggtcgccccccgctggccggtccaccggatcaggctggagcgggcgcagttcgacctgcaggccattcagcgagatccccaggggcggggtaaggactgggaccccgaggagtggcagcgaggtccttgttggggccggcgtaatatctactcggcgaagcggcatgagcagggtaatcgctgcgcctattgcggaaaaaaccccaagaaagagaaccgattagagctcgagcacgttaaaccgggtggcggcaatacttgggataacctggtgctggcctgccgtaagtgcaaccaacgcaaagggaaggctgacgccccgggtgccggtcttgagttttccgttgaccccgataccggagtgagtctggctcccaggggattgggagagtccgtggtggcccggtacatgacccagaccgaccagggataccgggagctggtggcccgcctgcagcaattgttccccgacgcccagatcgagtaccgctacggctatcagacggatcatattcgtaaacggtggatcggctcggcccagtttgcggagaccgctttgtcactcggctacaaacagtcgccgccgcggccgaagaaacgccgaaagcagtggaccgaattggcgcatctgaagcgcaaacccaggcgacacagcgatcccctcaaaagtcatgtgatggacgcggtcgccatcgctagtgccctagagctcgactctccgccgcagctttgcccggcggagaagattatccttcgcccttctcgacgccagctcttcgacaccaaccccctccagcgcggaagtgacgacaagttttaccagcgggtgaagatttgcggcacccagggcgggctggccttcgacaagctgaagcacgtggttgatgacagcaagcgggcgattctggagcgagtgcgcgaccggctgatcgagcaggctaaggtgatcgagcagcctaagggcaacaaagaatccccgcccagcgccttcaccccggatgctgcccagctgatccccttcacgtctgttcgcttggccaaacgagacgcctccaagaccaacacccggaggttaaagggcgggcactggtacaaggttgccggtgggcccaattgggccaccgtcgtctatcggcttggcgtccgtgaacaggtaatcgtgattcgcaacccagcagtgttccccgacgattcagcggaactgccgaaaggcgctcaggtgctcttttccttccgaaagggagagttggtttcctttgagcaggatgggcaaacaacgcgcgcccgaatcaccaagaacaacagcaacggcactctaaccgtcgaacgcctcgacgacggccgggaagtgacccggtcagctcgctgctttcgccccgtccccctgctagcgcccaacgcctga

SEQ ID NO: 65 - DNA, 168 bp, Artificial Sequence
  Synthetic
cggagagtgaaaaaagctcagccaagggagaccccgcgggaaaccgtcaggggccaccgttaggaggcaagtttggggaataggtaggggtaaccctaagtgcaacctggggtgcgccttcagctccaggctctgcagggtccggcccagaggactaacgccctaacg

SEQ ID NO: 66 - DNA, 36 bp, Artificial Sequence
  Synthetic
ctcctactctccggtaaaagggcggtgtgctacagc

SEQ ID NO: 67 - DNA, 36 bp, Artificial Sequence
  Synthetic
gtttcactctccggtaaaagggcggtgtgctacagc

SEQ ID NO: 68 - DNA, 2328 bp, Artificial Sequence
  Synthetic
gtggtcgtgaggccacaaggcaagctggaccatattcctatccctaaacctgagcgaggaggcattacaattcggtccgagaacgtgctggggattgacttcgggccggagcacgtggggctggccttggtgcggcgggagccggccggggagcaggtgctctacgcggcttccatcaccttgcgcgacctgtccccggtgatgaaggagcgccgcgctctcaggcggcagcggcgctctgagtcatggtaccgccagcccagggtcccgcagcggggcgggggcagcgcgcggggagccggggcccaggaagatgagcaggccgtcgagggtgtgccggaagaggaggaggaggatcgaagtcgtgcgcggtccgctcccgagtaccggcgggcgcagggatgcaataagcccaagcgaaagtgcaagtatgttgaccccaagaccggcgaggtctgcggggccaacacccctcgcaaggagaaggtgcgagacctgctgctgtgggacatctgccagcacttgccggtggaacctgagcagcgccttgccatcctcagctacgtcaatcaggtcaatattgtccgcccggaagtgctggcgtgccttgccctggaagagcgggccttgctggaaaaccatcgagctctggcccgcgcttcgaagagcaagcctctcccccagcttctctgcgaactgaagatcaagaaacagttacaatcccagattctggcgatcgccagcggagaccccgaacgcaaagccgccgacctcaaggggcggatggccttctgccgcaagcattttctccttcaccaccaacagaccaggattcccaagccctccgcctggcttccgcccagtatccggtgtcggcacgccgacctggagagggtctgccgggaggaggtcgccccccgctggccggtccaccggatcaggctggagcgggcgcagttcgacctgcaggccattcagcgagatccccaggggcggggtaaggactgggaccccgaggagtggcagcgaggtccttgttggggccggcgcaatatctactcggcgaagcggcatgaacagggtaaccgctgcgcctattgcggaaaagaacccaagaaagagaaccgattagagctcgagcacgttaaaccgggtggcggcaatacttgggataacctggtgctggcctgccgtaagtgcaaccaacgcaaggggaaggctgaggcccggggtgccggtcttaagttctctgttgaccccgatacaggagtgagtctggctcccaggggattgggagagtccgtggtggcccggtacatgacccagaccgaccagggataccgggagctggtggctcgcctgcagcaattgttccccgacgcccagatcgagtaccgctacggctatcagacggatcatattcgtaaacggtggatcggctcggcccagtttgcggagaccgctttgtcactcggctacaaacagtcgccgccgcggccgaagaaacgccgaaagcagtggagcgaattggcgcatctgaagcgcaaacccaggcgacacagcgatcccctcaaaagtcatgtgatggacgcggtcgcgatagccggttctctccagcgggattctccgccggagctttgccaggccgataagataaccatccgcccttcccggcgtcaacttttcgacaccaaccccctggggcgcgggagcgacggcaggttctaccagcgtgttaagatttgcgggacccagggaggcctctcgtttcgcagagttaaacacgtggttgacgctcgcaagcgggctattttggagcgcgtccgtgacctgctgatcgagcaggctaagggcaacgaggaatccccgcccagcgccttcaccccggatgctgcccagctgatccccttcacctctgttcgcttggccaaacgagacgcctccaagaccaacacccggaggttacacgcgccagacgatgatcgtctgccccagcagaagggcgggcactggtacaaggctgccggtgggcccaattgggccaccgtggtctatcggcttggcggccgtgaacaggtggcagtactgcgcaacccggcggcttttccagacgcttcttcggacatcccggcaggcgctcaggtgctcttttccttccgaaagggaaagttggtttcctttgagcaggatgggcaaacaacgcgcgcccgaatcaccaagaacaacagcgacggcactctaaccgtcgaacgcctcgacgacggccgggaagtgacccggtcagctcgctgctttcgccccgtccccctgctagcgcccaacgcctga

SEQ ID NO: 69 - DNA, 167 bp, Artificial Sequence
  Synthetic
ggagagtgaaaaaagctcagccaagggagaccccgcgggaaaccgccaggggctaccgtcaggaggcaagtttggggaataggtaggggtaaccctaagtgcaacctggggtgcgccttcagctccaggctctgcagggtccggcccagaggactaacgccctaacg

SEQ ID NO: 70 - DNA, 2067 bp, Artificial Sequence
  Synthetic
gtgagtacgagtgcaggcgagtgtgtgctcggcctggacttcgggccgaagcacgctgggctcgcggtggtcctgcggggtccctcggccgacgaagtggtgttcgccggggaggtgcgtttgcgcgccctgaaggccttacgctctgaccggaaaaccccactctccgagcggaagaccatactcggcgtccggcgggccttgcgccgcagtcgccgcagccgcaagcgctaccgccagccgaagattccccagcgcggcggcggggccaccacagataccccggagaacaccagtgccgccaggggccgccctcccgagtaccgtcgcgccaccggcctcaacacaggccgaagacgctgcaagttcacggaccccaccaccggcgaagtctgcgccgtgaacaccccccgcaagaccaacgtgcgcgacctgctgctctggaacatctgccgtcaccttcccgtgtctcttgcagagcgcgccgcctttgtgtcctacgtcaaccagcgcaacctccaacagggtgaagtgctggacgcgcttccggcagcggaccaggccgcgcttcaggccgtctttgctcagcagcgcaagcccaagcaggaaccccttgccgcgcgaatgcgtcgcctgggagttgaccgccacctgcgctcacagatcacggacattgtgggcactacctcacgccggcccctcagcggcaggctctcgttctgtcggcagcacttcctccgccaccacgagcagacccgagtagcccgtccgagcgtgtggcttcctactaccatagagatgaagcacgcggatgtcctccgcgtgtgcggccaagagatcgcgcccaggtggcaggtgcgccgaatcgtgctggagcgcgcgggcttcgaccttcagctcctgcggcagcaagtatccttggagtggagagtggaggactggcagcgagggccccgctggggctaccggaataccttcgaggcgaagaagcaggaccaaggcaaccgctgcgcctactgcgggaagaagccgtcacgcgagaaccgatttgagctggagcatgtggcccctggcggcggcgattcctgggagaacctggtgctcagttgccgcgcctgcaaccagcgcaaagggagtcgaagtcccgccgaggccggaatgctcttctgggcggacaccgaaaccggagagaccctggccccgctatctctcggcctgtcacgcgtggcccgctacatgacccagactgaccagggctggcgcaggctggaggcttcgctgcggaggctgttcccaggtgcagaggtggagtacacttgggggtatcagactagcttctaccgcaaccgctggggcctgcccaagaagcactacgctgacgccgcggtcattgccagctctcaccaactggagcgcaagctcgcgcttcccgagcagccgaagcgcttcgcgcccgcgccaggcggcaagcggctcttcgacacgaacccgctcgcgcgcgaacccgacggccacttcacccagcggcagaagctggtgagcgagcagggagggctgacgttcgccgaagtcccacgcgtggagaacccgcggaagcggaagctactccaggccgcagccgacaaggcaatagccgaggccgccgccaaaggagagaagccgccggcggcgttcactgcggcgatgcttgctggccttccgttcaactcagtccgcctcaccaagcccgacgcgcaggagcgcaatacccgacagctagggcagcagtggttcaaagtcgcggggggccccaacgtcgccaccatcctctacgaacacaacggcaaccaggccaccctcgtcaaacggaaccccgctatcttccgcgctgacccaggcctgcccagaggggcgcgcgttcttgcggtctaccgcaaaggtgacttcgtggagtgcagcgacggcctgggccgggtgacgaagaaccacagcaacggcactctaactgtcgaactggtggatacaggaaaggcggtgacgcggcaggccaagtcgttccggccggcgcgcaagccgccgcgaggatag

SEQ ID NO: 71 - DNA, 220 bp, Artificial Sequence
  Synthetic
gaagggcgaaaacagcccagccaagactcgccgcggacaggcctggtagcacaggactgagccggtgtggcgagcgcgggaaaccggcggggaaactcggccggctaccgtcaggaggcacgtttggggaacaggtaggggcaaccctgagtgcaacctggggtgcaccttcagctccaggctctgcaaggctcggcccagagggactaacgccctaatc

SEQ ID NO: 72 - DNA, 28 bp, Artificial Sequence
  Synthetic
tttcgccctcgcgctggtggacacggtg

SEQ ID NO: 73 - DNA, 28 bp, Artificial Sequence
  Synthetic
tttcgccctcgcgctggtggacacggcg

SEQ ID NO: 74 - DNA, 28 bp, Artificial Sequence
  Synthetic
tttcgccctcgcgctggtggacacggct

SEQ ID NO: 75 - DNA, 28 bp, Artificial Sequence
  Synthetic
tttcgccctcgcgctggtggacagggcg

SEQ ID NO: 76 - DNA, 1920 bp, Artificial Sequence
  Synthetic
atgccgaacgtgctggggatagatttgggcggcaaagccgtggggctcgccgtggtggagcagccggacaaccgcgttgcatggtgcgggaccgtccacctttccgacaggatcaaggatctgtacgaccagcgccggacgctgcgccggggccggcgctcacgcgtgcgttaccgcaagcccaaagttgccgaacggggtggcggctcggccggtcagactcagtggagcggattcaaataccgccgggccaaggggctcaaccagtcactccggaccaagtgcaagtacgtcgaccgggaaaccggcgaagtctgcgaacggaacacgccaaagaaggccaatgtccgccatctccttatccaggacatcctgagctttcagccgttcgccgaggtgccgccggatcacagacaggtcatccgcgatgtccttgcctcgcgcgaaggtgcaggaacccggcgtaagcggctccagaacatcctcagccggctcaacgtggacacttacctcaagaagcaggtcgacgacatctgcttcaacgatctccccggccgggccgaattctgccgcaaacacatcctcgctcaccatgagcagacggacataccggcacaggccgtttggctcccgccatcgatccgcctaaagcaggactttgtcctgaagcagattcgggttctgtcgcgccgattccgtatcgacaagatcgtcatcgagcgggcgaacttcgacctccagaagattgcggcgggagtgatcgatgatccggcggaatatcaggaaggtcaccgctacggcttccggaacacccgcgcggcgatgatgcaggagtacggggcgcggtgctgctattgcggcaagagcgtggtaggcaagaagtggcaccttgaccacatcgagcccaagaagaccggcgagatcaaccgctgggataatctggccatcgcctgcgaaaagtgcaatcagcggaagggcagcaggacacccacggaggcgggcatgtccttcgccgtcgtttccgaaaacatcgcgggcaggcggatcaggcgctcattggcgcccaagcccgtggagggcggccgcatccacaagtacatgacacagaccgatcaaggcatccgcatcctgaagcgcaacctgggggcaatcatcccccatgcacccatcgaagaaacgttcggctacgacaccgcggcctggcggggcgtgtggggcctggagaaaggcaaggagaagggggaacatcacaacgacgcaattgtcatcgcctcgctgcggtcaccggaggcggggccgatcatcgaagtggacccggaagtgagccgccaggctgtcggcgggaagcggatattcgaccagaaccccatccagcgcgcaggcgacggcaaccactatcagaggatcccggtcgtcgccgaggtcggcggcatcacgccgagacaactccgggccgtggtggacgaacagaagagggcgctcctggcacgcgagttcgagcggctcgagatcaaggggaatcggtcgcttccggatagggcccgccagcgcttgcccttcaagagcgtccgcctccgcaaaagagactgcacggacgagaacgttcgcacgatgaaaagcgggcaccgcttcaaggtctccaacgtcggcgggacgcgcgtcaacgaggcactggtcgtgtaccgcacacatgcggggaaggtagcgtgctatccgatgaagaaccggcgtgccttcgggcctacacttccgccagcggactttgaaaaggagcttaggcgtttcaggcccgccgacgcggtatacgaggctggggggaaggaactagggcggatcgtcgttctctggagcagcggtcgcgtgaagctggacagtggggtaaccagggcggcgaccaaatgcttgaaaggaggtggttga

SEQ ID NO: 77 - DNA, 185 bp, Artificial Sequence
  Synthetic
ctaggtcaaaagcacgcctcagcgattccccgactgttcggggaagccagggaacccaacgaaaggcgggacctggccaggagctacgtttgcaggacagccaaagacctatgccgggatgtagtgcctcgtctacccagtcccggcctcttggagtctcggcccggaagattaacgccctcgcc

SEQ ID NO: 78 - DNA, 24 bp, Artificial Sequence
  Synthetic
ggtcgcagcgtgcatgggatgaat

SEQ ID NO: 79 - DNA, 24 bp, Artificial Sequence
  Synthetic
tggcctcgcgtgcatgggatgaat

SEQ ID NO: 80 - DNA, 12750 bp, Artificial Sequence
  Synthetic
  misc_feature (1)..(6024): n is a, c, g, or t
nnnnnnnnnnnnnnnnnnnnnnnnnnnnnnnnnnnnnnnnnnnnnnnnnnnnnnnnnnnnnnnnnnnnnnnnnnnnnnnnnnnnnnnnnnnnnnnnnnnnnnnnnnnnnnnnnnnnnnnnnnnnnnnnnnnnnnnnnnnnnnnnnnnnnnnnnnnnnnnnnnnnnnnnnnnnnnnnnnnnnnnnnnnnnnnnnnnnnnnnnnnnnnnnnnnnnnnnnnnnnnnnnnnnnnnnnnnnnnnnnnnnnnnnnnnnnnnnnnnnnnnnnnnnnnnnnnnnnnnnnnnnnnnnnnnnnnnnnnnnnnnnnnnnnnnnnnnnnnnnnnnnnnnnnnnnnnnnnnnnnnnnnnnnnnnnnnnnnnnnnnnnnnnnnnnnnnnnnnnnnnnnnnnnnnnnnnnnnnnnnnnnnnnnnnnnnnnnnnnnnnnnnnnnnnnnnnnnnnnnnnnnnnnnnnnnnnnnnnnnnnnnnnnnnnnnnnnnnnnnnnnnnnnnnnnnnnnnnnnnnnnnnnnnnnnnnnnnnnnnnnnnnnnnnnnnnnnnnnnnnnnnnnnnnnnnnnnnnnnnnnnnnnnnnnnnnnnnnnnnnnnnnnnnnnnnnnnnnnnnnnnnnnnnnnnnnnnnnnnnnnnnnnnnnnnnnnnnnnnnnnnnnnnnnnnnnnnnnnnnnnnnnnnnnnnnnnnnnnnnnnnnnnnnnnnnnnnnnnnnnnnnnnnnnnnnnnnnnnnnnnnnnnnnnnnnnnnnnnnnnnnnnnnnnnnnnnnnnnnnnnnnnnnnnnnnnnnnnnnnnnnnnnnnnnnnnnnnnnnnnnnnnnnnnnnnnnnnnnnnnnnnnnnnnnnnnnnnnnnnnnnnnnnnnnnnnnnnnnnnnnnnnnnnnnnnnnnnnnnnnnnnnnnnnnnnnnnnnnnnnnnnnnnnnnnnnnnnnnnnnnnnnnnnnnnnnnnnnnnnnnnnnnnnnnnnnnnnnnnnnnnnnnnnnnnnnnnnnnnnnnnnnnnnnnnnnnnnnnnnnnnnnnnnnnnnnnnnnnnnnnnnnnnnnnnnnnnnnnnnnnnnnnnnnnnnnnnnnnnnnnnnnnnnnnnnnnnnnnnnnnnnnnnnnnnnnnnnnnnnnnnnnnnnnnnnnnnnnnnnnnnnnnnnnnnnnnnnnnnnnnnnnnnnnnnnnnnnnnnnnnnnnnnnnnnnnnnnnnnnnnnnnnnnnnnnnnnnnnnnnnnnnnnnnnnnnnnnnnnnnnnnnnnnnnnnnnnnnnnnnnnnnnnnnnnnnnnnnnnnnnnnnnnnnnnnnnnnnnnnnnnnnnnnnnnnnnnnnnnnnnnnnnnnnnnnnnnnnnnnnnnnnnnnnnnnnnnnnnnnnnnnnnnnnnnnnnnnnnnnnnnnnnnnnnnnnnnnnnnnnnnnnnnnnnnnnnnnnnnnnnnnnnnnnnnnnnnnnnnnnnnnnnnnnnnnnnnnnnnnnnnnnnnnnnnnnnnnnnnnnnnnnnnnnnnnnnnnnnnnnnnnnnnnnnnnnnnnnnnnnnnnnnnnnnnnnnnnnnnnnnnnnnnnnnnnnnnnnnnnnnnnnnnnnnnnnnnnnnnnnnnnnnnnnnnnnnnnnnnnnnnnnnnnnnnnnnnnnnnnnnnnnnnnnnnnnnnnnnnnnnnnnnnnnnnnnnnnnnnnnnnnnnnnnnnnnnnnnnnnnnnnnnnnnnnnnnnnnnnnnnnnnnnnnnnnnnnnnnnnnnnnnnnnnnnnnnnnnnnnnnnnnnnnnnnnnnnnnnnnnnnnnnnnnnnnnnnnnnnnnnnnnnnnnnnnnnnnnnnnnnnnnnnnnnnnnnnnnnnnnnnnnnnnnnnnnnnnnnnnnnnnnnnnnnnnnnnnnnnnnnnnnnnnnnnnnnnnnnnnnnnnnnnnnnnnnnnnnnnnnnnnnnnnnnnnnnnnnnnnnnnnnnnnnnnnnnnnnnnnnnnnnnnnnnnnnnnnnnnnnnnnnnnnnnnnnnnnnnnnnnnnnnnnnnnnnnnnnnnnnnnnnnnnnnnnnnnnnnnnnnnnnnnnnnnnnnnnnnnnnnnnnnnnnnnnnnnnnnnnnnnnnnnnnnnnnnnnnnnnnnnnnnnnnnnnnnnnnnnnnnnnnnnnnnnnnnnnnnnnnnnnnnnnnnnnnnnnnnnnnnnnnnnnnnnnnnnnnnnnnnnnnnnnnnnnnnnnnnnnnnnnnnnnnnnnnnnnnnnnnnnnnnnnnnnnnnnnnnnnnnnnnnnnnnnnnnnnnnnnnnnnnnnnnnnnnnnnnnnnnnnnnnnnnnnnnnnnnnnnnnnnnnnnnnnnnnnnnnnnnnnnnnnnnnnnnnnnnnnnnnnnnnnnnnnnnnnnnnnnnnnnnnnnnnnnnnnnnnnnnnnnnnnnnnnnnnnnnnnnnnnnnnnnnnnnnnnnnnnnnnnnnnnnnnnnnnnnnnnnnnnnnnnnnnnnnnnnnnnnnnnnnnnnnnnnnnnnnnnnnnnnnnnnnnnnnnnnnnnnnnnnnnnnnnnnnnnnnnnnnnnnnnnnnnnnnnnnnnnnnnnnnnnnnnnnnnnnnnnnnnnnnnnnnnnnnnnnnnnnnnnnnnnnnnnnnnnnnnnnnnnnnnnnnnnnnnnnnnnnnnnnnnnnnnnnnnnnnnnnnnnnnnnnnnnnnnnnnnnnnnnnnnnnnnnnnnnnnnnnnnnnnnnnnnnnnnnnnnnnnnnnnnnnnnnnnnnnnnnnnnnnnnnnnnnnnnnnnnnnnnnnnnnnnnnnnnnnnnnnnnnnnnnnnnnnnnnnnnnnnnnnnnnnnnnnnnnnnnnnnnnnnnnnnnnnnnnnnnnnnnnnnnnnnnnnnnnnnnnnnnnnnnnnnnnnnnnnnnnnnnnnnnnnnnnnnnnnnnnnnnnnnnnnnnnnnnnnnnnnnnnnnnnnnnnnnnnnnnnnnnnnnnnnnnnnnnnnnnnnnnnnnnnnnnnnnnnnnnnnnnnnnnnnnnnnnnnnnnnnnnnnnnnnnnnnnnnnnnnnnnnnnnnnnnnnnnnnnnnnnnnnnnnnnnnnnnnnnnnnnnnnnnnnnnnnnnnnnnnnnnnnnnnnnnnnnnnnnnnnnnnnnnnnnnnnnnnnnnnnnnnnnnnnnnnnnnnnnnnnnnnnnnnnnnnnnnnnnnnnnnnnnnnnnnnnnnnnnnnnnnnnnnnnnnnnnnnnnnnnnnnnnnnnnnnnnnnnnnnnnnnnnnnnnnnnnnnnnnnnnnnnnnnnnnnnnnnnnnnnnnnnnnnnnnnnnnnnnnnnnnnnnnnnnnnnnnnnnnnnnnnnnnnnnnnnnnnnnnnnnnnnnnnnnnnnnnnnnnnnnnnnnnnnnnnnnnnnnnnnnnnnnnnnnnnnnnnnnnnnnnnnnnnnnnnnnnnnnnnnnnnnnnnnnnnnnnnnnnnnnnnnnnnnnnnnnnnnnnnnnnnnnnnnnnnnnnnnnnnnnnnnnnnnnnnnnnnnnnnnnnnnnnnnnnnnnnnnnnnnnnnnnnnnnnnnnnnnnnnnnnnnnnnnnnnnnnnnnnnnnnnnnnnnnnnnnnnnnnnnnnnnnnnnnnnnnnnnnnnnnnnnnnnnnnnnnnnnnnnnnnnnnnnnnnnnnnnnnnnnnnnnnnnnnnnnnnnnnnnnnnnnnnnnnnnnnnnnnnnnnnnnnnnnnnnnnnnnnnnnnnnnnnnnnnnnnnnnnnnnnnnnnnnnnnnnnnnnnnnnnnnnnnnnnnnnnnnnnnnnnnnnnnnnnnnnnnnnnnnnnnnnnnnnnnnnnnnnnnnnnnnnnnnnnnnnnnnnnnnnnnnnnnnnnnnnnnnnnnnnnnnnnnnnnnnnnnnnnnnnnnnnnnnnnnnnnnnnnnnnnnnnnnnnnnnnnnnnnnnnnnnnnnnnnnnnnnnnnnnnnnnnnnnnnnnnnnnnnnnnnnnnnnnnnnnnnnnnnnnnnnnnnnnnnnnnnnnnnnnnnnnnnnnnnnnnnnnnnnnnnnnnnnnnnnnnnnnnnnnnnnnnnnnnnnnnnnnnnnnnnnnnnnnnnnnnnnnnnnnnnnnnnnnnnnnnnnnnnnnnnnnnnnnnnnnnnnnnnnnnnnnnnnnnnnnnnnnnnnnnnnnnnnnnnnnnnnnnnnnnnnnnnnnnnnnnnnnnnnnnnnnnnnnnnnnnnnnnnnnnnnnnnnnnnnnnnnnnnnnnnnnnnnnnnnnnnnnnnnnnnnnnnnnnnnnnnnnnnnnnnnnnnnnnnnnnnnnnnnnnnnnnnnnnnnnnnnnnnnnnnnnnnnnnnnnnnnnnnnnnnnnnnnnnnnnnnnnnnnnnnnnnnnnnnnnnnnnnnnnnnnnnnnnnnnnnnnnnnnnnnnnnnnnnnnnnnnnnnnnnnnnnnnnnnnnnnnnnnnnnnnnnnnnnnnnnnnnnnnnnnnnnnnnnnnnnnnnnnnnnnnnnnnnnnnnnnnnnnnnnnnnnnnnnnnnnnnnnnnnnnnnnnnnnnnnnnnnnnnnnnnnnnnnnnnnnnnnnnnnnnnnnnnnnnnnnnnnnnnnnnnnnnnnnnnnnnnnnnnnnnnnnnnnnnnnnnnnnnnnnnnnnnnnnnnnnnnnnnnnnnnnnnnnnnnnnnnnnnnnnnnnnnnnnnnnnnnnnnnnnnnnnnnnnnnnnnnnnnnnnnnnnnnnnnnnnnnnnnnnnnnnnnnnnnnnnnnnnnnnnnnnnnnnnnnnnnnnnnnnnnnnnnnnnnnnnnnnnnnnnnnnnnnnnnnnnnnnnnnnnnnnnnnnnnnnnnnnnnnnnnnnnnnnnnnnnnnnnnnnnnnnnnnnnnnnnnnnnnnnnnnnnnnnnnnnnnnnnnnnnnnnnnnnnnnnnnnnnnnnnnnnnnnnnnnnnnnnnnnnnnnnnnnnnnnnnnnnnnnnnnnnnnnnnnnnnnnnnnnnnnnnnnnnnnnnnnnnnnnnnnnnnnnnnnnnnnnnnnnnnnnnnnnnnnnnnnnnnnnnnnnnnnnnnnnnnnnnnnnnnnnnnnnnnnnnnnnnnnnnnnnnnnnnnnnnnnnnnnnnnnnnnnnnnnnnnnnnnnnnnnnnnnnnnnnnnnnnnnnnnnnnnnnnnnnnnnnnnnnnnnnnnnnnnnnnnnnnnnnnnnnnnnnnnnnnnnnnnnnnnnnnnnnnnnnnnnnnnnnnnnnnnnnnnnnnnnnnnnnnnnnnnnnnnnnnnnnnnnnnnnnnnnnnnnnnnnnnnnnnnnnnnnnnnnnnnnnnnnnnnnnnnnnnnnnnnnnnnnnnnnnnnnnnnnnnnnnnnnnnnnnnnnnnnnnnnnnnnnnnnnnnnnnnnnnnnnnnnnnnnnnnnnnnnnnnnnnnnnnnnnnnnnnnnnnnnnnnnnnnnnnnnnnnnnnnnnnnnnnnnnnnnnnnnnnnnnnnnnnnnnnnnnnnnnnnnnnnnnnnnnnnnnnnnnnnnnnnnnnnnnnnnnnnnnnnnnnnnnnnnnnnnnnnnnnnnnnnnnnnnnnnnnnnnnnnnnnnnnnnnnnnnnnnnnnnnnnnnnnnnnnnnnnnnnnnnnnnnnnnnnnnnnnnnnnnnnnnnnnnnnnnnnnnnnnnnnnnnnnnnnnnnnnnnnnnnnnnnnnnnnnnnnnnnnnnnnnnnnnnnnnnnnnnnnnnnnnnnnnnnnnnnnnnnnnnnnnnnnnnnnnnnnnnnnnnnnnnnnnnnnnnnnnnnnnnnnnnnnnnnnnnnnnnnnnnnnnnnnnnnnnnnnnnnnnnnnnnnnnnnnnnnnnnnnnnnnnnnnnnnnnnnnnnnnnnnnnnnnnnnnnnnnnnnnnnnnnnnnnnnnnnnnnnnnnnnnnnnnnnnnnnnnnnnnnnnnnnnnnnnnnnnnnnnnnnnnnnnnnnnnnnnnnnnnnnnnnnnnnnnnnnnnnnnnnnnnnnnnnnnnnnnnnnnnnnnnnnnnnnnnnnnnnnnnnnnnnnnnnnnnnnnnnnnnnnnnnnnnnnnnnnnnnnnnnnnnnnnnnnnnnnnnnnnnnnnnnnnnnnnnnnnnnnnnnnnnnnnnnnnnnnnnnnnnnnnnnnnnnnnnnnnnnnnnnnnnnnnnnnnnnnnnnnnnnnnnnnnnnnnnnnnnnnnnnnnnnnnnnnnnnnnggcggtggtcgcggcagcggttgtcgaagcgggtggtgatctcgacgcagcgcccgcccttgcgcagggttacttccgaaacgatccgcagcggcaaggtttgctccgagcgcgaggcgcagtcgccgtcgccatcgaggcggcggacgtcgctgccgtgcccctcgaccaggtgttcgggcgcgtcaatcacctggtcaatccgatacgtcgccagcagcggcccggcctcttttacggtgacgctcgcggcggctccgcgggtggtgatgacgcgatcgaacgcggggggcaggtgacgccaggcgtgcccggcctcgccgccgtcctcgaagtagtggaggccggcgaaggtgcggccggtctgcttgtgggtgacgtcgagggtgccgtcgccgttgacgcgcacgcgcaggtgctcgttttccatcgtccgctcatcggtcaccaggctgccgggcaagcggtcggcatgctcgcgggggcggaggaggtaggtgcggtagccaagcgcgggcagcgcctcggcgttgaagcgcacctggacggtggtggaagacatctcgctggtggcgtcgccgaggtggcgcaccaccgccatgcggtcctcgcgcgagacctcctgcgtctcgacgcgccgaccgctggcctcctcgatgaggtcgaactggttgatgccgagttcggccggcaggtcgaggtaagcgctcagcacctcggagcgctcgcggggcgaggggttgaaggcggtgagcaggatcgcatcggcgccgagatgggagtgatccacccggcgggcgagggcctgaaagctgcggcgcatcaggctggcggcgatgccgcgcacctggtcgaggcggtggtgcatatcgcgctcgatctggtccaccccgctgccggcgatgctgtcgtgggcgtggcagcgcagcagatagcgccaggcgatatcgagcagcgacttgggatactcctcgcccagcagccaggccagggcggcgaagggttccgcctggcgctgcagcgcgtgctcggcgaggccgttggcgcgcttgacgcgcacgcggctggaggtgacgtcgccgaacaggtgcacgcgcgtgcccagctcgcgcggggtgcggcgctcgccgcgcagcacggtcaggtccttcgcctgcgccttgaccttggccagccaatcctccagggacgagtgcatgatccggtccggcgcgacgatcccctcggcctgggcgacgatctcgacctcgcgcgggtcgggctcggtggagtccatgcccatcatgcaggcgatgtagcgggtggcggcgtgctcgcgctcgacctggcgcaggcgatggaggccctcgaccagcttgtcgcggtcgaggcctttgcgcggatcaaccaggaagtggtgtgagcgccatttccccgggccgcagaggtgaaagggcaggccgccctcctcccagaggtagcggcgctccatgatctgcttgccgtaaaccgcggggcgaaagacctggtagaagaagttgtagcgggcgaaggagcccatgcgcgagccgaagaggcgcgagccgtcggggccctcgaggatgaactcggagcgggactcgtcgggcgtgatgccgtgatagaagaggatggtatcaatgccgaagccggagtagatctgcgccatctgcgaggcctggccgtaggagaaggggctgtagccgaccttcatcacgcggccgaagctctcggcgacgacgtggccggccagcaggttgcgcaccagcgattcgccgttgacgttgaactcctcggggcaggtgtaccaggggccgatgtgcaggcgctgctcgcgcaccaggcgggcgatgcgctcgcgctggtgggggcgcacctccaggtaatcctccagcggaacggtctgcgaatcgagcaggtaggagcggtagcgcggctcggaatcgagcaggtcgagcagcttgtccatgaactcgaccaggagcatgcgcgtctcctggaagtcgtaaagccactcgcggtcccagtgggtgttggagatgacatgaagctcaagtgtctcttcaggcataatgacctccagatctgattgtccgcaggcttcacagatttcgcgcatgagggcattgaaccacagagaacccttcgacttccctcagggtaaactccgagggcgcagagacagagtttagccgccgatgaacgccgatcattatccgttccgtcctctctgtgttctcggtgccctctgcggttcagattattgcaatccgcgcaatctgcggcatctgcggatgaatctccctgcgccggggagggcgctttcgccgcggccgcgcacggctcctgtaagggcaggagccgcccatgcgccggcagaatctacaacctatggcagccccttccctgtgcgacaagatagtctcccgcgagcgggcggcgcaggcgatcgctgatctgcgcgcccggggccagcgcgtcgtcttcaccaacggctgcttcgacctgctgcacgccgggcatgccctctatctcgagcgggcgcgggcgctgggcgactgcctcatcgtcggcctcaacagcgacgaatcggtggttgccctcaaaggccccgcgcggccgatcgtgaacgagaccgagcgcgcgcagctcctggcggcgctggagagcgttgacttggtcatcatcttctccgagccgacctcggaggcgctgctcgacctgctgcgcccggaggtgttcgtcaagggcggcgattacacgcgggcgacgatgaaccaggaggagaagaacttcgtcgagtcctacgggggcgaggtgcacctcatccccgcgctgcccgagagctccaccacgcgcatcatcgaacgcatcgtgaccgcgcacggggaatgacggtcccgccgggaaccgagcgcgaggccgccgggtgtgtacgagtttcgttcgtgggatcgccgggcagggcgcaaaccaacgctgcgcgaacacacccgtcgttgctccccgcgcagtcacaagttcggttgaccaacgggctaccggatggtatacttgcgttggtatagcgtaaccgctccttgacaatcaagcctctgacacaggcaattacgcgagctgccaggagagtgaggcctgaagaacgagctgctgccaaaaggccaaagccttgtcaaggcgagaagtcaagcgtatttggagtggagcatcggactcctactctcgtttcactctccggtaaaagggcggtgtgctacagcacggcagggccgtggacgattgaacagcctgtttcactctccggtaaaagggcggtgtgctacagcatacccggctaaatcaacagacggcccctaggtttcactctccggtaaaagggcggtgtgctacagcaggggcggtggatgctcctatgctgccagagtttcactctccggtaaaagggcggtgtgctacagcttgagaatcatgcggtggagatggattctggtttcactctccggtaaaagggcggtgtgctacagccaccgaatagtctttgtacgtgccggggaggtttcactctccggtaaaagggcggtgtgctacagcgaccaacgacgtgcatgatgtagcgatctagtttcactctccggtaaaagggcggtgtgctacagcgcagtgcttgcaagggcatcgctcactctcgtttcactctccggtaaaagggcggtgtgctacagcagagcgaggctgactgaattcggggaagtgctgcaaattcgacgctggaaggccctgtttcaattgtcggagagtgaaaaaagctcagccaagggagaccccgcgggaaaccgccaggggctaccgtcaggaggcaagtttggggaataggtaggggtaaccctaagtgcaacctggggtgcgccttcagctccaggctctgcagggtccggcccagaggactaacgccctaacgtgaagtcgagggagagaaaggtggtcgtgaggccacaaggcaagctggaccatattcctatccctaaacctgagcgaggaggcattacaattcggtccgagaacgtgctggggattgacttcgggccggagcacgtggggctggccttggtgcggcgggagccggccggggagcaggtgctctacgcggcttccatcaccttgcgcgacctgtccccggtgatgaaggagcgccgcgctctcaggcggcagcggcgctctgagtcatggtaccgccagcccagggtcccgcagcggggcgggggcagcgcgcggggagccggggcccaggaagatgagcaggccgtcgagggtgtgccggaagaggaggaggaggatcgaagtcgtgcgcggtccgctcccgagtaccggcgggcgcagggatgcaataagcccaagcgaaagtgcaagtatgttgaccccaagaccggcgaggtctgcggggccaacacccctcgcaaggagaaggtgcgagacctgctgctgtgggacatctgccagcacttgccggtggaacctgagcagcgccttgccatcctcagctacgtcaatcaggtcaatattgtccgcccggaagtgctggcgtgccttgccctggaagagcgggccttgctggaaaaccatcgagctctggcccgcgcttcgaagagcaagcctctcccccagcttctctgcgaactgaagatcaagaaacagttacaatcccagattctggcgatcgccagcggagaccccgaacgcaaagccgccgacctcaaggggcggatggccttctgccgcaagcattttctccttcaccaccaacagaccaggattcccaagccctccgcctggcttccgcccagtatccggtgtcggcacgccgacctggagagggtctgccgggaggaggtcgccccccgctggccggtccaccggatcaggctggagcgggcgcagttcgacctgcaggccattcagcgagatccccaggggcggggtaaggactgggaccccgaggagtggcagcgaggtccttgttggggccggcgcaatatctactcggcgaagcggcatgaacagggtaaccgctgcgcctattgcggaaaagaacccaagaaagagaaccgattagagctcgagcacgttaaaccgggtggcggcaatacttgggataacctggtgctggcctgccgtaagtgcaaccaacgcaaggggaaggctgaggcccggggtgccggtcttaagttctctgttgaccccgatacaggagtgagtctggctcccaggggattgggagagtccgtggtggcccggtacatgacccagaccgaccagggataccgggagctggtggctcgcctgcagcaattgttccccgacgcccagatcgagtaccgctacggctatcagacggatcatattcgtaaacggtggatcggctcggcccagtttgcggagaccgctttgtcactcggctacaaacagtcgccgccgcggccgaagaaacgccgaaagcagtggagcgaattggcgcatctgaagcgcaaacccaggcgacacagcgatcccctcaaaagtcatgtgatggacgcggtcgcgatagccggttctctccagcgggattctccgccggagctttgccaggccgataagataaccatccgcccttcccggcgtcaacttttcgacaccaaccccctggggcgcgggagcgacggcaggttctaccagcgtgttaagatttgcgggacccagggaggcctctcgtttcgcagagttaaacacgtggttgacgctcgcaagcgggctattttggagcgcgtccgtgacctgctgatcgagcaggctaagggcaacgaggaatccccgcccagcgccttcaccccggatgctgcccagctgatccccttcacctctgttcgcttggccaaacgagacgcctccaagaccaacacccggaggttacacgcgccagacgatgatcgtctgccccagcagaagggcgggcactggtacaaggctgccggtgggcccaattgggccaccgtggtctatcggcttggcggccgtgaacaggtggcagtactgcgcaacccggcggcttttccagacgcttcttcggacatcccggcaggcgctcaggtgctcttttccttccgaaagggaaagttggtttcctttgagcaggatgggcaaacaacgcgcgcccgaatcaccaagaacaacagcgacggcactctaaccgtcgaacgcctcgacgacggccgggaagtgacccggtcagctcgctgctttcgccccgtccccctgctagcgcccaacgcctgacgccttgtctgagcacccgccagtgcccctcgcacagctccctccaactgcgcccgcagcatctcctcctgccagggggcgagcgcctcggtctcgcacgctgtcaccgtccccggcggccgctgccggagaccgagcagcggcccggtttcgggcggcagtatgtgggcacgttgacggcggtgctgctgccggtgacggcgctgctgctggttgccgcgattggtttccaggtggtcttcgcttcccagagcctggtcctggcgaagagggagaaggtggagatctaccagagcgagttggcatactacggtttgccgcggccgctttccgggcggtgaggcccgggccggtcgccgcgccaggagaaacggccgtccgcggccaagatatccctggggcaggaggcaagctcctgcccta

SEQ ID NO: 81 - DNA, 14406 bp, Artificial Sequence
  Synthetic
  misc_feature (1)..(5667): n is a, c, g, or t
nnnnnnnnnnnnnnnnnnnnnnnnnnnnnnnnnnnnnnnnnnnnnnnnnnnnnnnnnnnnnnnnnnnnnnnnnnnnnnnnnnnnnnnnnnnnnnnnnnnnnnnnnnnnnnnnnnnnnnnnnnnnnnnnnnnnnnnnnnnnnnnnnnnnnnnnnnnnnnnnnnnnnnnnnnnnnnnnnnnnnnnnnnnnnnnnnnnnnnnnnnnnnnnnnnnnnnnnnnnnnnnnnnnnnnnnnnnnnnnnnnnnnnnnnnnnnnnnnnnnnnnnnnnnnnnnnnnnnnnnnnnnnnnnnnnnnnnnnnnnnnnnnnnnnnnnnnnnnnnnnnnnnnnnnnnnnnnnnnnnnnnnnnnnnnnnnnnnnnnnnnnnnnnnnnnnnnnnnnnnnnnnnnnnnnnnnnnnnnnnnnnnnnnnnnnnnnnnnnnnnnnnnnnnnnnnnnnnnnnnnnnnnnnnnnnnnnnnnnnnnnnnnnnnnnnnnnnnnnnnnnnnnnnnnnnnnnnnnnnnnnnnnnnnnnnnnnnnnnnnnnnnnnnnnnnnnnnnnnnnnnnnnnnnnnnnnnnnnnnnnnnnnnnnnnnnnnnnnnnnnnnnnnnnnnnnnnnnnnnnnnnnnnnnnnnnnnnnnnnnnnnnnnnnnnnnnnnnnnnnnnnnnnnnnnnnnnnnnnnnnnnnnnnnnnnnnnnnnnnnnnnnnnnnnnnnnnnnnnnnnnnnnnnnnnnnnnnnnnnnnnnnnnnnnnnnnnnnnnnnnnnnnnnnnnnnnnnnnnnnnnnnnnnnnnnnnnnnnnnnnnnnnnnnnnnnnnnnnnnnnnnnnnnnnnnnnnnnnnnnnnnnnnnnnnnnnnnnnnnnnnnnnnnnnnnnnnnnnnnnnnnnnnnnnnnnnnnnnnnnnnnnnnnnnnnnnnnnnnnnnnnnnnnnnnnnnnnnnnnnnnnnnnnnnnnnnnnnnnnnnnnnnnnnnnnnnnnnnnnnnnnnnnnnnnnnnnnnnnnnnnnnnnnnnnnnnnnnnnnnnnnnnnnnnnnnnnnnnnnnnnnnnnnnnnnnnnnnnnnnnnnnnnnnnnnnnnnnnnnnnnnnnnnnnnnnnnnnnnnnnnnnnnnnnnnnnnnnnnnnnnnnnnnnnnnnnnnnnnnnnnnnnnnnnnnnnnnnnnnnnnnnnnnnnnnnnnnnnnnnnnnnnnnnnnnnnnnnnnnnnnnnnnnnnnnnnnnnnnnnnnnnnnnnnnnnnnnnnnnnnnnnnnnnnnnnnnnnnnnnnnnnnnnnnnnnnnnnnnnnnnnnnnnnnnnnnnnnnnnnnnnnnnnnnnnnnnnnnnnnnnnnnnnnnnnnnnnnnnnnnnnnnnnnnnnnnnnnnnnnnnnnnnnnnnnnnnnnnnnnnnnnnnnnnnnnnnnnnnnnnnnnnnnnnnnnnnnnnnnnnnnnnnnnnnnnnnnnnnnnnnnnnnnnnnnnnnnnnnnnnnnnnnnnnnnnnnnnnnnnnnnnnnnnnnnnnnnnnnnnnnnnnnnnnnnnnnnnnnnnnnnnnnnnnnnnnnnnnnnnnnnnnnnnnnnnnnnnnnnnnnnnnnnnnnnnnnnnnnnnnnnnnnnnnnnnnnnnnnnnnnnnnnnnnnnnnnnnnnnnnnnnnnnnnnnnnnnnnnnnnnnnnnnnnnnnnnnnnnnnnnnnnnnnnnnnnnnnnnnnnnnnnnnnnnnnnnnnnnnnnnnnnnnnnnnnnnnnnnnnnnnnnnnnnnnnnnnnnnnnnnnnnnnnnnnnnnnnnnnnnnnnnnnnnnnnnnnnnnnnnnnnnnnnnnnnnnnnnnnnnnnnnnnnnnnnnnnnnnnnnnnnnnnnnnnnnnnnnnnnnnnnnnnnnnnnnnnnnnnnnnnnnnnnnnnnnnnnnnnnnnnnnnnnnnnnnnnnnnnnnnnnnnnnnnnnnnnnnnnnnnnnnnnnnnnnnnnnnnnnnnnnnnnnnnnnnnnnnnnnnnnnnnnnnnnnnnnnnnnnnnnnnnnnnnnnnnnnnnnnnnnnnnnnnnnnnnnnnnnnnnnnnnnnnnnnnnnnnnnnnnnnnnnnnnnnnnnnnnnnnnnnnnnnnnnnnnnnnnnnnnnnnnnnnnnnnnnnnnnnnnnnnnnnnnnnnnnnnnnnnnnnnnnnnnnnnnnnnnnnnnnnnnnnnnnnnnnnnnnnnnnnnnnnnnnnnnnnnnnnnnnnnnnnnnnnnnnnnnnnnnnnnnnnnnnnnnnnnnnnnnnnnnnnnnnnnnnnnnnnnnnnnnnnnnnnnnnnnnnnnnnnnnnnnnnnnnnnnnnnnnnnnnnnnnnnnnnnnnnnnnnnnnnnnnnnnnnnnnnnnnnnnnnnnnnnnnnnnnnnnnnnnnnnnnnnnnnnnnnnnnnnnnnnnnnnnnnnnnnnnnnnnnnnnnnnnnnnnnnnnnnnnnnnnnnnnnnnnnnnnnnnnnnnnnnnnnnnnnnnnnnnnnnnnnnnnnnnnnnnnnnnnnnnnnnnnnnnnnnnnnnnnnnnnnnnnnnnnnnnnnnnnnnnnnnnnnnnnnnnnnnnnnnnnnnnnnnnnnnnnnnnnnnnnnnnnnnnnnnnnnnnnnnnnnnnnnnnnnnnnnnnnnnnnnnnnnnnnnnnnnnnnnnnnnnnnnnnnnnnnnnnnnnnnnnnnnnnnnnnnnnnnnnnnnnnnnnnnnnnnnnnnnnnnnnnnnnnnnnnnnnnnnnnnnnnnnnnnnnnnnnnnnnnnnnnnnnnnnnnnnnnnnnnnnnnnnnnnnnnnnnnnnnnnnnnnnnnnnnnnnnnnnnnnnnnnnnnnnnnnnnnnnnnnnnnnnnnnnnnnnnnnnnnnnnnnnnnnnnnnnnnnnnnnnnnnnnnnnnnnnnnnnnnnnnnnnnnnnnnnnnnnnnnnnnnnnnnnnnnnnnnnnnnnnnnnnnnnnnnnnnnnnnnnnnnnnnnnnnnnnnnnnnnnnnnnnnnnnnnnnnnnnnnnnnnnnnnnnnnnnnnnnnnnnnnnnnnnnnnnnnnnnnnnnnnnnnnnnnnnnnnnnnnnnnnnnnnnnnnnnnnnnnnnnnnnnnnnnnnnnnnnnnnnnnnnnnnnnnnnnnnnnnnnnnnnnnnnnnnnnnnnnnnnnnnnnnnnnnnnnnnnnnnnnnnnnnnnnnnnnnnnnnnnnnnnnnnnnnnnnnnnnnnnnnnnnnnnnnnnnnnnnnnnnnnnnnnnnnnnnnnnnnnnnnnnnnnnnnnnnnnnnnnnnnnnnnnnnnnnnnnnnnnnnnnnnnnnnnnnnnnnnnnnnnnnnnnnnnnnnnnnnnnnnnnnnnnnnnnnnnnnnnnnnnnnnnnnnnnnnnnnnnnnnnnnnnnnnnnnnnnnnnnnnnnnnnnnnnnnnnnnnnnnnnnnnnnnnnnnnnnnnnnnnnnnnnnnnnnnnnnnnnnnnnnnnnnnnnnnnnnnnnnnnnnnnnnnnnnnnnnnnnnnnnnnnnnnnnnnnnnnnnnnnnnnnnnnnnnnnnnnnnnnnnnnnnnnnnnnnnnnnnnnnnnnnnnnnnnnnnnnnnnnnnnnnnnnnnnnnnnnnnnnnnnnnnnnnnnnnnnnnnnnnnnnnnnnnnnnnnnnnnnnnnnnnnnnnnnnnnnnnnnnnnnnnnnnnnnnnnnnnnnnnnnnnnnnnnnnnnnnnnnnnnnnnnnnnnnnnnnnnnnnnnnnnnnnnnnnnnnnnnnnnnnnnnnnnnnnnnnnnnnnnnnnnnnnnnnnnnnnnnnnnnnnnnnnnnnnnnnnnnnnnnnnnnnnnnnnnnnnnnnnnnnnnnnnnnnnnnnnnnnnnnnnnnnnnnnnnnnnnnnnnnnnnnnnnnnnnnnnnnnnnnnnnnnnnnnnnnnnnnnnnnnnnnnnnnnnnnnnnnnnnnnnnnnnnnnnnnnnnnnnnnnnnnnnnnnnnnnnnnnnnnnnnnnnnnnnnnnnnnnnnnnnnnnnnnnnnnnnnnnnnnnnnnnnnnnnnnnnnnnnnnnnnnnnnnnnnnnnnnnnnnnnnnnnnnnnnnnnnnnnnnnnnnnnnnnnnnnnnnnnnnnnnnnnnnnnnnnnnnnnnnnnnnnnnnnnnnnnnnnnnnnnnnnnnnnnnnnnnnnnnnnnnnnnnnnnnnnnnnnnnnnnnnnnnnnnnnnnnnnnnnnnnnnnnnnnnnnnnnnnnnnnnnnnnnnnnnnnnnnnnnnnnnnnnnnnnnnnnnnnnnnnnnnnnnnnnnnnnnnnnnnnnnnnnnnnnnnnnnnnnnnnnnnnnnnnnnnnnnnnnnnnnnnnnnnnnnnnnnnnnnnnnnnnnnnnnnnnnnnnnnnnnnnnnnnnnnnnnnnnnnnnnnnnnnnnnnnnnnnnnnnnnnnnnnnnnnnnnnnnnnnnnnnnnnnnnnnnnnnnnnnnnnnnnnnnnnnnnnnnnnnnnnnnnnnnnnnnnnnnnnnnnnnnnnnnnnnnnnnnnnnnnnnnnnnnnnnnnnnnnnnnnnnnnnnnnnnnnnnnnnnnnnnnnnnnnnnnnnnnnnnnnnnnnnnnnnnnnnnnnnnnnnnnnnnnnnnnnnnnnnnnnnnnnnnnnnnnnnnnnnnnnnnnnnnnnnnnnnnnnnnnnnnnnnnnnnnnnnnnnnnnnnnnnnnnnnnnnnnnnnnnnnnnnnnnnnnnnnnnnnnnnnnnnnnnnnnnnnnnnnnnnnnnnnnnnnnnnnnnnnnnnnnnnnnnnnnnnnnnnnnnnnnnnnnnnnnnnnnnnnnnnnnnnnnnnnnnnnnnnnnnnnnnnnnnnnnnnnnnnnnnnnnnnnnnnnnnnnnnnnnnnnnnnnnnnnnnnnnnnnnnnnnnnnnnnnnnnnnnnnnnnnnnnnnnnnnnnnnnnnnnnnnnnnnnnnnnnnnnnnnnnnnnnnnnnnnnnnnnnnnnnnnnnnnnnnnnnnnnnnnnnnnnnnnnnnnnnnnnnnnnnnnnnnnnnnnnnnnnnnnnnnnnnnnnnnnnnnnnnnnnnnnnnnnnnnnnnnnnnnnnnnnnnnnnnnnnnnnnnnnnnnnnnnnnnnnnnnnnnnnnnnnnnnnnnnnnnnnnnnnnnnnnnnnnnnnnnnnnnnnnnnnnnnnnnnnnnnnnnnnnnnnnnnnnnnnnnnnnnnnnnnnnnnnnnnnnnnnnnnnnnnnnnnnnnnnnnnnnnnnnnnnnnnnnnnnnnnnnnnnnnnnnnnnnnnnnnnnnnnnnnnnnnnnnnnnnnnnnnnnnnnnnnnnnnnnnnnnnnnnnnnnnnnnnnnnnnnnnnnnnnnnnnnnnnnnnnnnnnnnnnnnnnnnnnnnnnnnnnnnnnnnnnnnnnnnnnnnnnnnnnnnnnnnnnnnnnnnnnnnnnnnnnnnnnnnnnnnnnnnnnnnnnnnnnnnnnnnnnnnnnnnnnnnnnnnnnnnnnnnnnnnnnnnnnnnnnnnnnnnnnnnnnnnnnnnnnnnnnnnnnnnnnnnnnnnnnnnnnnnnnnnnnnnnnnnnnnnnnnnnnnnnnnnnnnnnnnnnnnnnnnnnnnnnnnnnnnnnnnnnnnnnnnnnnnnnnnnnnnnnnnnnnnnnnnnnnnnnnnnnnnnnnnnnnnnnnnnnnnnnnnnnnnnnnnnnnnnnnnnnnnnnnnnnnnnnnnnnnnnnnnnnnnnnnnnnnnnnnnnnnnnnnnnnnnnnnnnnnnnnnnnnnnnnnnnnnnnnnnnnnnnnnnnnnnnnnnnnnnnnnnnnnnnnnnnnnnnnnnnnnnnnnnnnnnnnnnaggccctggcgcaggcgatcaacgacgccacggccgccatcatcgtccagagccccaacttcttcgactgcatcgacgacgtgagcgacctcgccgacctcgcccaccggcacggggcgctgctgatcgtctcctcgtacccgatcgcactggggctgctcaagcccccggggcagatgggcgccgatatcgtcgtcggcgaagggcaatcgctcggcatgccgatctccttcggcgggccgtacctgggcttcatggccacgcgcaagaaactcgtccgcaagatgcccggccgcgtcgtcgggcgcacagtggacacgcagggccgtgagggattcgtcctcaccctccaggcccgcgaacagcacatccgccgcgagaaggccaccagcaacatctgcacgaacgagggcctgtgcgccctgacggctgtggcgtaccttagcctgctgggcaagcacggcctgcgcgacctcgcccagacctgcgccgacaaggccgactacgcccgccaccgcctgctccaggtgcccggcgtcaccatgcggttccccaaccgctggtacttcaacgagttcgtcctgaacctgccgatggcggccgacaaggtcatccgcgggctgttcacacgcggcatcgcggccggcttcccgctcgggcgctactggcccgagatgaacaactgcctgctcatcgccctcaccgagaaacggaccaagcaggacattgacttcctcgcccacacgctggaggtgatcctgtgaagctcatctacggaaagagcgttccgggtcgccgaggcgtccgcccggtcggaagcgacgtgccgacgaaggccgagattcgcaagaacctgctgcgcgaggagcccgcggcgctgccggaggtgtcggaactcgacgtcgtgcggcacttcacggagctgagccgccggaacttcggcgtggacaccggcttctacccgctcggctcgtgcacgatgaagtacaacccgaaggtcaccgagcggatcgcccattaccccggcttcgcctacctgcacccgctgctgccgcaactgcccggcggcgagacgatggttcagggggcgctcgcggtgctgcaccgcatggacctgctgctgcgggagatctgcggcatggccgcgttcaccatgcagccgctcgcgggcgcgcacggggagctcaccggcgtgatgatcatcgccgcgtaccacaaggcccgcggcaaccgcaagacaaccatcctgatccccgacagcgcgcacggcacgaaccccgccagcgccgccatcgccgggtacggcgtgcggacgatcgcctccgacgccgacggcgtcatggacgccaccgccctccgcgaggccctccacgacggagtcgccggcgtcatgctcacgtgccccaatacgctgggcctgttcaacccacgaatcaagcagatcgccgacctcgtccacggcgtggacgggctgatgtactacgacggcgcgaacctcaacgccctgctcggcaagtgccgcccgggcgacgtcggcttcgacatcgtccacgtcaacctgcacaagacgttcggcacgccccacggcggcggcgggccgggcgcggggccggtcggcgtcgtcgagaggctcgtcgagttcctgcccacctccgtcgtctgcgagcgcgacgacggctcctactacctcgactacgcccggccgcattcgatcggctacgtcgcgccgttctacggcaacttcgcggtggtcctgcgggcctacgcgtacatcctcatgctcggccgcgaggggctgctgcgtgtcgcggagaacgccgtgctcaacgccaactacgtgctggccaagttgcgagagcggtacgacgtggcggtggaccgcgtgtgcaagcacgagtgcgtgctgtcggcctcgcggcaggagaaggccggcgtgcgggcgatcgacatcgccaaggcgctgatcgaccgcggcttccacccgccaacggtttacttcccgctgaccgtgcccgaatcgatgatgatcgagccgaccgagaccgagtcgaaggaaactctcgacgccttcatcgccgcaatgttggagatcgccgatctcgccgagaaggaccccgagtcgctgaaggcctgcccgcggaccacgcccgtcggccgactcgacgaaacccgcgccgcccgcaagcccgacctggcatacctgctctgagcgagggcggcatggcggccgttgtctgccgccatgctcctccggcgaagcaaaagcgaggacgattcctgtttccgcggcacggggcccccttccccgggttatactgctggtcgcggccggaaggcgcatcccgttccgccgcgacgacctgccgactgacgcgacccgcccggagaccacgacatgcgaccatcccgacctgccgtttgtctcgccttggccctgcccgtagtcgccctgtccgccggatcctctgaagcgggcatgttcggcgccccgcccatgcggacctcggccgccgccgataccgaccacagcacacccgcccacgccccggacttcggcagcagaaccctctggccgcacgttacgggcgacgaggcatacgtcaagcagacctggcccaaggcccgcgtcctcgtctggaccggcggcaacggcaggttcgccgacgccgccaactggctcgaggacggcaagcccgcccaggccgccccagaccgcaacaccgacgtcgtcttcccaccggccaaggcggcgtacaaggtcgatgcctacaagcagcactgccgacacatcacgatcggccgcaacgccagtgtcgagggccgcaacggaaactccacccgctacctcaatgtctggggcaacatctggattcacgccggcgggcgcgggttcttcatcgcgccggtcggcggcggcaacaccttcttccgccgcgacggcgagctacagaaggacaacagaggcaaacgcatctacgacttcggcttcggcgacaaggcgacgatcaccaagtacggcggcgccagcgtcgaaatcctcggcgtcctgggcacgaacgacgagatctacatcgcctccggcaagacgatcctcggccccacgtgccggttcatctacagcgcgatgaccggcaacggcacgttcgaggtctatgacggggcgaccctggagcttcagtcgggcgcggttctggctatcgaccgcgcgagcgtcgagtacaacgtgtcgatctacaccggcggcacgctccaggccggctcgcccaagcgtccgctcacgcgcgacgctttcctccgcatggccccgggccggcgcggcgggctgttcctcgaacccggtgccagactccgcgttcacagcgccgaaccggccgaggcgcgcctcgtgttcgagtccacgcaacccgggaagaggctctccgccaagggcgtcaagatggtcttcggcggcgatgctcacatcgacggcgccgtgttcgaccagtgcgaggccggcggcgtcgaagtcacagaccttgccgtggtgaagggctggaagcacgtcacgctcgggccgaacaacctcgccaagggccagggcatcttcgcgaagatctccggcaaactctacgaccgcgggcccaagaagcaccgcatctacgttaagccctgcctggcggccatgaagcagttccaggcagaggacgccgaatccggcaaggacgacagatagcgtctcgcgcccctgcggccggctgggggctggttgaacgccccccgcccagccgatagagtgaagagcgttaggcgcctgtagctcaaccggatagagcagcggtcttctaagcaaattgcagcgataggcgcgaatcacgggaagtggcggaaacgccgacgggcgcgtattttcggggccttgactccgcggcttcgatctcgtcaaaggccgggaaatcggcctcggcaaccgtagaaccgtagcacgtcggccaacggtgtgcgcccggaatcggcgcgggcgccggggggatccagaccggctcgggcggggatcggcgcttgtggggccgcgtgcggcgtcgggatcgcgggaccgggatcgtcgctctccggcgatcctcgcggcgtggcgggccgcgtggtgagcgttcagaccgggcgccgggccgtgcccagccgtcggccgggatcgcggctctcgcgggcaattaggcttggcggcgccgccggctgcccgcttccgatgctaggaccccgaagcccagacgcggcccaactgcagcgcaaggaagcccgttgccacaatccaggtcacgtggtatgatgtttgcccgcaactgagattggggccgaatggcaaacgtccttgggatagacctgggcggcaaggcggtggggctggccatcgtccagcagccggagaatcaggttctctggtgcggcaccgttcacctctcggatcggatcaaggacctctacgaccaacgccgcgttctgcgccgcgcccggcgctcccgcgtccgctaccgcaagccgaaggtccagcagcgcggcggcggctccggcggccggggaaccgaaggcgccacctacttctacaagcgtgcgaagggcctcaatcagtcgctccgcagaaagtgcaagtacgtggaccccaacaccggcgaagtctgcggccgcaacacgcccaagcgaggcaacgtccgccacctgctgatcgaggacatcctgagcaactactcgcccttcgccacagtcgatgcaacgctgaagcaagcgattcgcgacatcctcgccagtcgcgaaggaatcactcgccgccaggagcggctcaagaatgttctcgacctcatcgacatcaacgccgacctgaagaagcagatcaccgatatcttgtttggcacaggcgagcgccgctgtgagttctgccgcgaccatatcctctcccaccacgagcagacgcagacgccggccgatccccgttggctgccgccttcgatccggctcaagcaggagtttctcctcaagcaggttcgccgcctcgcgcaccgttaccgcattgaccgcgtcgtcatcgagcgggcaaggttcgaccttcagaagatcgcccgcggcgtcatcgacgacccggccgagtaccagcagggccaccgatacggcttccggaacgtccgggcggccctctttcaggagttcagcggccactgctgctattgcgggcggagcgtcattgacaagaagtggcacgttgaccatgtggacccgcgccgcaagacgggggcggggcggtgggacaacctggccgtcgcctgcgagtcctgcaaccacacgaagggcggccggtcgccgcaggaagcggggatggcgttcgcgaccatcccggcggtcgtcgcggggcgccgcatccgccggtcgctcgcgccaaaaccgattgaaggcgcccgcatccacaagtatatgacgcagacggaccagggcatccgaatcctcaagcgcgagctgcgggaaatccttggggccgtcgagatcgacgagacgttcggatacgtcacgagcgcctggcgagacctgtgggagttacccaaggggcgcgagacgaacgaacaccacaacgacgccatcgtgatcgcggccaacctcacgccggatgcccgccccaagctcgacggcgagccggaagccgtccggcagttgatcggcggcaagcgactgtacgatcagaaccccgtttcccggcggggcgacgggaagtactaccagcgtcagccggtgctggccgagcaaggcggcatcacgcgccggcagcttcgccaagtggtggacgagcgcaggcgacgtatcctcgccgccgcgttcgagtaccacggcgtcaagggcaacaagacgctgccgcccgccgcgctccagcagttgccattcaagagcgtgcggctgcgcaaggccgactgcaccgatgagaacacccgcgctctcccggcccggaaccgccggcatcgctacaagatctccaacacaggcggaacgcgcgtgaacgaggcagtggccgtgtatcaaacgaccggcggtcgccgggcctgctacgccgtgaagaaccggcgcgtcttcggacggacgccgcccccggaggacctcgcgaaggaactgtggcgcgtgcggcccggcgatacgctccacgattcgtcgggcgacgtgctgggcgccgtcgtgaagctgggaagcaacgggacgctgacgctggatagcgggagaacccgaatggctcaccgatgccacagggcgatcagcccctgagatgagtcggacacaaacgggcgagtgtgcgcccgcgttgctgcattgacaaccgaataggtgcctgcgtagcgaacgctgacccgcgtgcgtgggagtgatcgcgtcgccctctgcctctggcgcgagcatgtgattccggactcgcgtgcgtgggagtgattgattgagccacgtcgtcgggtgcgggacgaacattccggactcgcgtgcgtgggagtgatttctttggcttggtcatggctcgaccaccttgaattccggactcgcgtgcgtgggagtgattggaaccatgaccaagccaaagaagcgtacatgcattccggactcgcgtgcgtgggagtgataataatccgccaactcacacgcttccagcaggtcattccggactcgcgtgcgtgggagtgatatcgtaatagaccttcagcgggaccgcgacctcattccggactcgcgtgcgtgggagtgatcgaccatcgaagcccgcccgttgcgggccaaccattccggactcgcgtgcgtgggagtgatactggcatcttgcggaccggatgccggcgaagcacaagatgatgttgttcaggccaaagctagtgtccccgcgggtccggacgcgaagtatctcccacggaagcgagttcggaagcagcctcagcgatcccgagagatcgggagccagggaacccaacgaaaggcgggacctggccagaagctacgtttgcaggacagctgaagacctatgccgggatgtagtgatctcgtctacccagtcccggccccttggagtctcggcccacaagatcaacgccccagcggttcggccgggggaaagaaacgtcctcgtgaggggacatcgccacggcgacgcccgcccaacggcgggcgaggcaagccgagacatgtgcgacctgcaaaccttggctggggatagacgggagttcttttcccgcgctgaagcgtgcggggcgaagtggagcgcgccgggtgtgcgcgccgactgaacggtcaagatggaccctgaaggaagaagcgaagaagacaagaagaaggaagcggaaggctattgggagccttacgcgtatttcgcgcgcgctgtccgcctttggttcctggcgtacggcgttggctttccgatcgccatcatctcaaacgagtggttgctgaagcgattgcgcgcctcaggttgtctggcgacggtggcgtggctgttcatagccggggtggtggtgcaggtcctcgccgcgatgttctggcgcacgtcgatgtggtaccagtacctatgcgagcctcgtgggccgaaggtccgccggcggcgcgcgtggatgtttagggcttcaagatgggtatccgagcagtactggatcgagttgatccccgacattgctacgctggtgttattcgcccgcgcaacagccacggcgctgcgcgtcatctgctcggattgagggcgtgtgttccgcatcgcacgccgccaaggggcacgagggatccctccggcttgccgccggtcagaagcgcgaacaggcgggcgacttcttcgccggcggcgcggatcgcggtcggggcgttgttgcggtgctggccagcgggatcgcgtctgtgcgggccgcccagggcggcggctacgggggcggcggggccgcgtcgcgttcgcgattggccgggcagtcggcaggcagcggataggccggatcgccggccagcgcgcggcggcgcttgcagccgggaaggtggccgacggcgcaccagggccggcgggcgcagccgatgcaccgatccggccgcgcggggcgcggggaaggcgcgggcgagtggggtcgctgttgggggcggggcaaacgttccgccgtgaacccctccggacactcgtccggaaaaccgacggccgcccgctgggccgggtccgtacggcaggcccggcagtgcaggcggctggcgcacgcttggcgaacggcaggactcatgggcacccgcccagggtgacgttggcggtgcagccagaacagtcctccccgccgctgccgctcaggtcgattccgtcgagactgaacgagccggtgagctggtagccggacgggtcgcactccctgcaggcgattccgtccacgtcctgccagtaatagctgccggggttgctcgcgggcgccgttccgtactgagataccgggctggagcagccgagccgggccttccattggtccgcgacgatgtcgtacaggacgtacaggtagaacgtgccggtcccgttcttgcacttccagctcgtccagcagtagttcccctcgtcgcgataccgggccgcgtagctgtacgtgcccgcggcgttgcagtcgccggcgcatgccccgtccacggtgacgacagcgtccgtatgggatgtgtgatagcagccgtcgcaagggtccgcagcgcaggcgttgaccaggtggccgccggagcctttgagtagatggccgctggggcctttct

SEQ ID NO: 82 - DNA, 16188 bp, Artificial Sequence
  Synthetic
  misc_feature (1)..(5585): n is a, c, g, or t
nnnnnnnnnnnnnnnnnnnnnnnnnnnnnnnnnnnnnnnnnnnnnnnnnnnnnnnnnnnnnnnnnnnnnnnnnnnnnnnnnnnnnnnnnnnnnnnnnnnnnnnnnnnnnnnnnnnnnnnnnnnnnnnnnnnnnnnnnnnnnnnnnnnnnnnnnnnnnnnnnnnnnnnnnnnnnnnnnnnnnnnnnnnnnnnnnnnnnnnnnnnnnnnnnnnnnnnnnnnnnnnnnnnnnnnnnnnnnnnnnnnnnnnnnnnnnnnnnnnnnnnnnnnnnnnnnnnnnnnnnnnnnnnnnnnnnnnnnnnnnnnnnnnnnnnnnnnnnnnnnnnnnnnnnnnnnnnnnnnnnnnnnnnnnnnnnnnnnnnnnnnnnnnnnnnnnnnnnnnnnnnnnnnnnnnnnnnnnnnnnnnnnnnnnnnnnnnnnnnnnnnnnnnnnnnnnnnnnnnnnnnnnnnnnnnnnnnnnnnnnnnnnnnnnnnnnnnnnnnnnnnnnnnnnnnnnnnnnnnnnnnnnnnnnnnnnnnnnnnnnnnnnnnnnnnnnnnnnnnnnnnnnnnnnnnnnnnnnnnnnnnnnnnnnnnnnnnnnnnnnnnnnnnnnnnnnnnnnnnnnnnnnnnnnnnnnnnnnnnnnnnnnnnnnnnnnnnnnnnnnnnnnnnnnnnnnnnnnnnnnnnnnnnnnnnnnnnnnnnnnnnnnnnnnnnnnnnnnnnnnnnnnnnnnnnnnnnnnnnnnnnnnnnnnnnnnnnnnnnnnnnnnnnnnnnnnnnnnnnnnnnnnnnnnnnnnnnnnnnnnnnnnnnnnnnnnnnnnnnnnnnnnnnnnnnnnnnnnnnnnnnnnnnnnnnnnnnnnnnnnnnnnnnnnnnnnnnnnnnnnnnnnnnnnnnnnnnnnnnnnnnnnnnnnnnnnnnnnnnnnnnnnnnnnnnnnnnnnnnnnnnnnnnnnnnnnnnnnnnnnnnnnnnnnnnnnnnnnnnnnnnnnnnnnnnnnnnnnnnnnnnnnnnnnnnnnnnnnnnnnnnnnnnnnnnnnnnnnnnnnnnnnnnnnnnnnnnnnnnnnnnnnnnnnnnnnnnnnnnnnnnnnnnnnnnnnnnnnnnnnnnnnnnnnnnnnnnnnnnnnnnnnnnnnnnnnnnnnnnnnnnnnnnnnnnnnnnnnnnnnnnnnnnnnnnnnnnnnnnnnnnnnnnnnnnnnnnnnnnnnnnnnnnnnnnnnnnnnnnnnnnnnnnnnnnnnnnnnnnnnnnnnnnnnnnnnnnnnnnnnnnnnnnnnnnnnnnnnnnnnnnnnnnnnnnnnnnnnnnnnnnnnnnnnnnnnnnnnnnnnnnnnnnnnnnnnnnnnnnnnnnnnnnnnnnnnnnnnnnnnnnnnnnnnnnnnnnnnnnnnnnnnnnnnnnnnnnnnnnnnnnnnnnnnnnnnnnnnnnnnnnnnnnnnnnnnnnnnnnnnnnnnnnnnnnnnnnnnnnnnnnnnnnnnnnnnnnnnnnnnnnnnnnnnnnnnnnnnnnnnnnnnnnnnnnnnnnnnnnnnnnnnnnnnnnnnnnnnnnnnnnnnnnnnnnnnnnnnnnnnnnnnnnnnnnnnnnnnnnnnnnnnnnnnnnnnnnnnnnnnnnnnnnnnnnnnnnnnnnnnnnnnnnnnnnnnnnnnnnnnnnnnnnnnnnnnnnnnnnnnnnnnnnnnnnnnnnnnnnnnnnnnnnnnnnnnnnnnnnnnnnnnnnnnnnnnnnnnnnnnnnnnnnnnnnnnnnnnnnnnnnnnnnnnnnnnnnnnnnnnnnnnnnnnnnnnnnnnnnnnnnnnnnnnnnnnnnnnnnnnnnnnnnnnnnnnnnnnnnnnnnnnnnnnnnnnnnnnnnnnnnnnnnnnnnnnnnnnnnnnnnnnnnnnnnnnnnnnnnnnnnnnnnnnnnnnnnnnnnnnnnnnnnnnnnnnnnnnnnnnnnnnnnnnnnnnnnnnnnnnnnnnnnnnnnnnnnnnnnnnnnnnnnnnnnnnnnnnnnnnnnnnnnnnnnnnnnnnnnnnnnnnnnnnnnnnnnnnnnnnnnnnnnnnnnnnnnnnnnnnnnnnnnnnnnnnnnnnnnnnnnnnnnnnnnnnnnnnnnnnnnnnnnnnnnnnnnnnnnnnnnnnnnnnnnnnnnnnnnnnnnnnnnnnnnnnnnnnnnnnnnnnnnnnnnnnnnnnnnnnnnnnnnnnnnnnnnnnnnnnnnnnnnnnnnnnnnnnnnnnnnnnnnnnnnnnnnnnnnnnnnnnnnnnnnnnnnnnnnnnnnnnnnnnnnnnnnnnnnnnnnnnnnnnnnnnnnnnnnnnnnnnnnnnnnnnnnnnnnnnnnnnnnnnnnnnnnnnnnnnnnnnnnnnnnnnnnnnnnnnnnnnnnnnnnnnnnnnnnnnnnnnnnnnnnnnnnnnnnnnnnnnnnnnnnnnnnnnnnnnnnnnnnnnnnnnnnnnnnnnnnnnnnnnnnnnnnnnnnnnnnnnnnnnnnnnnnnnnnnnnnnnnnnnnnnnnnnnnnnnnnnnnnnnnnnnnnnnnnnnnnnnnnnnnnnnnnnnnnnnnnnnnnnnnnnnnnnnnnnnnnnnnnnnnnnnnnnnnnnnnnnnnnnnnnnnnnnnnnnnnnnnnnnnnnnnnnnnnnnnnnnnnnnnnnnnnnnnnnnnnnnnnnnnnnnnnnnnnnnnnnnnnnnnnnnnnnnnnnnnnnnnnnnnnnnnnnnnnnnnnnnnnnnnnnnnnnnnnnnnnnnnnnnnnnnnnnnnnnnnnnnnnnnnnnnnnnnnnnnnnnnnnnnnnnnnnnnnnnnnnnnnnnnnnnnnnnnnnnnnnnnnnnnnnnnnnnnnnnnnnnnnnnnnnnnnnnnnnnnnnnnnnnnnnnnnnnnnnnnnnnnnnnnnnnnnnnnnnnnnnnnnnnnnnnnnnnnnnnnnnnnnnnnnnnnnnnnnnnnnnnnnnnnnnnnnnnnnnnnnnnnnnnnnnnnnnnnnnnnnnnnnnnnnnnnnnnnnnnnnnnnnnnnnnnnnnnnnnnnnnnnnnnnnnnnnnnnnnnnnnnnnnnnnnnnnnnnnnnnnnnnnnnnnnnnnnnnnnnnnnnnnnnnnnnnnnnnnnnnnnnnnnnnnnnnnnnnnnnnnnnnnnnnnnnnnnnnnnnnnnnnnnnnnnnnnnnnnnnnnnnnnnnnnnnnnnnnnnnnnnnnnnnnnnnnnnnnnnnnnnnnnnnnnnnnnnnnnnnnnnnnnnnnnnnnnnnnnnnnnnnnnnnnnnnnnnnnnnnnnnnnnnnnnnnnnnnnnnnnnnnnnnnnnnnnnnnnnnnnnnnnnnnnnnnnnnnnnnnnnnnnnnnnnnnnnnnnnnnnnnnnnnnnnnnnnnnnnnnnnnnnnnnnnnnnnnnnnnnnnnnnnnnnnnnnnnnnnnnnnnnnnnnnnnnnnnnnnnnnnnnnnnnnnnnnnnnnnnnnnnnnnnnnnnnnnnnnnnnnnnnnnnnnnnnnnnnnnnnnnnnnnnnnnnnnnnnnnnnnnnnnnnnnnnnnnnnnnnnnnnnnnnnnnnnnnnnnnnnnnnnnnnnnnnnnnnnnnnnnnnnnnnnnnnnnnnnnnnnnnnnnnnnnnnnnnnnnnnnnnnnnnnnnnnnnnnnnnnnnnnnnnnnnnnnnnnnnnnnnnnnnnnnnnnnnnnnnnnnnnnnnnnnnnnnnnnnnnnnnnnnnnnnnnnnnnnnnnnnnnnnnnnnnnnnnnnnnnnnnnnnnnnnnnnnnnnnnnnnnnnnnnnnnnnnnnnnnnnnnnnnnnnnnnnnnnnnnnnnnnnnnnnnnnnnnnnnnnnnnnnnnnnnnnnnnnnnnnnnnnnnnnnnnnnnnnnnnnnnnnnnnnnnnnnnnnnnnnnnnnnnnnnnnnnnnnnnnnnnnnnnnnnnnnnnnnnnnnnnnnnnnnnnnnnnnnnnnnnnnnnnnnnnnnnnnnnnnnnnnnnnnnnnnnnnnnnnnnnnnnnnnnnnnnnnnnnnnnnnnnnnnnnnnnnnnnnnnnnnnnnnnnnnnnnnnnnnnnnnnnnnnnnnnnnnnnnnnnnnnnnnnnnnnnnnnnnnnnnnnnnnnnnnnnnnnnnnnnnnnnnnnnnnnnnnnnnnnnnnnnnnnnnnnnnnnnnnnnnnnnnnnnnnnnnnnnnnnnnnnnnnnnnnnnnnnnnnnnnnnnnnnnnnnnnnnnnnnnnnnnnnnnnnnnnnnnnnnnnnnnnnnnnnnnnnnnnnnnnnnnnnnnnnnnnnnnnnnnnnnnnnnnnnnnnnnnnnnnnnnnnnnnnnnnnnnnnnnnnnnnnnnnnnnnnnnnnnnnnnnnnnnnnnnnnnnnnnnnnnnnnnnnnnnnnnnnnnnnnnnnnnnnnnnnnnnnnnnnnnnnnnnnnnnnnnnnnnnnnnnnnnnnnnnnnnnnnnnnnnnnnnnnnnnnnnnnnnnnnnnnnnnnnnnnnnnnnnnnnnnnnnnnnnnnnnnnnnnnnnnnnnnnnnnnnnnnnnnnnnnnnnnnnnnnnnnnnnnnnnnnnnnnnnnnnnnnnnnnnnnnnnnnnnnnnnnnnnnnnnnnnnnnnnnnnnnnnnnnnnnnnnnnnnnnnnnnnnnnnnnnnnnnnnnnnnnnnnnnnnnnnnnnnnnnnnnnnnnnnnnnnnnnnnnnnnnnnnnnnnnnnnnnnnnnnnnnnnnnnnnnnnnnnnnnnnnnnnnnnnnnnnnnnnnnnnnnnnnnnnnnnnnnnnnnnnnnnnnnnnnnnnnnnnnnnnnnnnnnnnnnnnnnnnnnnnnnnnnnnnnnnnnnnnnnnnnnnnnnnnnnnnnnnnnnnnnnnnnnnnnnnnnnnnnnnnnnnnnnnnnnnnnnnnnnnnnnnnnnnnnnnnnnnnnnnnnnnnnnnnnnnnnnnnnnnnnnnnnnnnnnnnnnnnnnnnnnnnnnnnnnnnnnnnnnnnnnnnnnnnnnnnnnnnnnnnnnnnnnnnnnnnnnnnnnnnnnnnnnnnnnnnnnnnnnnnnnnnnnnnnnnnnnnnnnnnnnnnnnnnnnnnnnnnnnnnnnnnnnnnnnnnnnnnnnnnnnnnnnnnnnnnnnnnnnnnnnnnnnnnnnnnnnnnnnnnnnnnnnnnnnnnnnnnnnnnnnnnnnnnnnnnnnnnnnnnnnnnnnnnnnnnnnnnnnnnnnnnnnnnnnnnnnnnnnnnnnnnnnnnnnnnnnnnnnnnnnnnnnnnnnnnnnnnnnnnnnnnnnnnnnnnnnnnnnnnnnnnnnnnnnnnnnnnnnnnnnnnnnnnnnnnnnnnnnnnnnnnnnnnnnnnnnnnnnnnnnnnnnnnnnnnnnnnnnnnnnnnnnnnnnnnnnnnnnnnnnnnnnnnnnnnnnnnnnnnnnnnnnnnnnnnnnnnnnnnnnnnnnnnnnnnnnnnnnnnnnnnnnnnnnnnnnnnnnnnnnnnnnnnnnnnnnnnnnnnnnnnnnnnnnnnnnnnnnnnnnnnnnnnnnnnnnnnnnnnnnnnnnnnnnnnnnnnnnnnnnnnnnnnnnnnnnnnnnnnnnnnnnnnnnnnnnnnnnnnnnnnnnnnnnnnnnnnnnnnnnnnnnnnnnnnnnnnnnnnnnnnnnnnnnnnnnnnnnnnnnnnnnnnnnnnnnnnnnnnnnnnnnnnnnnnnnnnnnnnnnnnnnnnnnnnnnnnnnnnnnnnnnnnnnnnnnattgcaggatacgatactgttttttataactcgtcaaatctggataaactgattgagattgcttcaagagaaagtcgcacaattttaaccagaaatagcggtttcataaaaaaagagagaaaggttttagaggaaagaggtatcccacatcttttattggcatctgacagtgttgaagaacagcttaaagagacagtagattattttaaacttgacctgaaggagagttcttttacactctgtgtggattgtaataagccgttttttaaaatatcaaaagaggatgctttgggtaaggttcctgagtttgtttatcaaaattacaatgaatttgtccaatgcacaaactgtaaaaagatattctgggaagggacacatagggaaaggatggaggaaatgcttaaaagagtgtattgataaactaatgaaaggttatattgtttatataacctatctttccgttttgtccaagacggtagaaatgccttatatcttttaataaagaggagatatcattcctttttaaataatttgtttctaaatagtgacagtagttcattgccattctgtttgcatccctgtatctttctttttcctctgataataaatccggatttagtatagaattttcaaacaactgtctctttatactttttgcagggactctgccggaattaatactgctgctgtagaaaatggctgtgatatatttatcaacctcagcctgaagctccatctcaaagatagttatctgtcttttatggatggcattccatactgcatatatgaaatggcttatctcctctgtggcaagaaaaaaatctgaaagatttattttgcagaaatctttttgcagatgaatattttttagattagatagtgtctctctgccgagatatacagctattttgagttcatcgtcattctggcataaaaatagataaccttttgatgaggggcttttaatcctacaggatttttgattgtttgaattattagaaagcgggtcatttatgaggtaattttctatattaaggaatgtctccactttatatattttttctattatcttctgtatccgggataacataaaatctattcgcccgctccctctttgggagggagtgggttggggatgagagggaataaaatatgcctactgtatatacttgctgcctttggatattataggaataacccctttttctttcaggagttgggcatccctatcactgtttgtcttgagccacctttcatatattctcaataaatcgctgtttgtgttgatggatgccttatcgctgacctctgcaattacatctatgaattctttaaatctctctgatagctcactgaagagctcactgaaaagctccccatttccgtatctcttggtaatatatgccaggttgctgtaggctctccctccgataactatataataatcaatatcaataagttttttcttaaggctgtcggagaaaaagcccgatacaaacagtgaaaaatctccaacctgcttaaatttccttatcctctcattgtattctgaatttatggcactttctaaaagcattataagaggctcatcagatgcctcttcagggaatgatttatcaatttcaacatactcagagagaagattcactaaatagaatgccactgtctcatcagtgtctatatcctgatggtctatagccgtatccaccagttccttgaagaattcagcagtgtttttatgtgttgttattttggctgccatatattttctctaatttaaaattatgccatactttttaagccattcagtttcgtcaaatttatccgaaatatattcttcaaaggcagcctcattttttgtaagtattctgccgtcaatgtaatctccttttggttttgattcatttggattatcttctaatgatttctccgctgtatttatgaagtcgtttaccttgattatcaaggcaagcattgcagatggttctatcatattcctttttttaaggtcaaagagaatgcccagcacatctttagattttaggagcgcctttgtaattgcccttgagagcccatcaagctctttgttgtctttttcattatctctcattatatcctcctgattatttatcggtattatttttaataatataattaagcaaaaaatataccatgattatcacttaattttaattcattgaaaaagaatgagatagctgatatattgaaataaataaggctggaaattatgtcctgattgtgtcaaatttatccagatttaagaaaaaatgttatgatattcgccaatgaaaaaatacggtgagaaagcaattgttagtgcaaaattagaagcgtgggataatccctatccggatagggattataagattgaaataagtttcccggagtttacatgcctctgccccagttcaggctatcctgattttgctacattcgccataaattacatccccgataagtgtataatagaactcaaatcactgaaactatatctaaacagttttagaaatcagtatatctcacatgaggcggtaacaaataaaatctatgatgctttaaataagactttgaaaccgcgttttatagaggtagtgggggattttaatgaaagggggaatgtaaagacagttataagagttacatcaaaacagtagtctaatagtctaaaagcctaagagtctaagagttgtttccttttagactcttagactgttagactgatttatttggttgactcctcaaggtctaacatcattgtattgccgacatatttcttactgattaccctttttatcctttgtagtttctttgtgacctcttttattctcattgcactctgaattgcagtattaagcatctcctttatatcttcattatttgtattcatcagggctaattcaatactgctgacaatgcctgtcaggggattatttatctcatggtttaaagttaccgctaactgagaaagtagagattctttatccttagaaagtatagtaagcgaattaatagaatttgatgttaataaatttaattcacttgctaattgttttgacataatgttgaccaccctctaaaaaatttactaatttatgttgcacttactatgccataatctattattatgctaacatattgatattataagtgttttgacttttgaatacccaaaatctctattgtaaatatgtcaaagttatgacttaatgggaaaaatattccgattaaatctatcatgccttaatatctttatcggatttatctaagtttttataaagtctttttttaggcgggctattctatatagagattcctcaatcctctcttcttttatctcaccactctctaatgtccttaatatagaattgaacatctctatctgtttattatggctatggcagattaagagtatatcaacccctgctttaacagactgaattgcagaaattttatcgctgtaattatttgagattgccttcatttccaaatcatctgtaattactacatcattaaacccaagtttttttcttaaaatctcatttattattttctctgacatagtagcaggataatcaggagctaaagcagggtaaagaacatgggctgtcataattgcccttaagcccattttaaatgtattaataaagggtttaagctctatctcctctaatctttctattttgtgatttacgataggaagttcaaggtgggaatcagagaaagtatctccatgtccggggaaatgtttacctacaggaattatatttttttcactaaatgcctttatgacatgcccaccgagtctggatacaacatcagggtcggaactgaaagacctgtcgccaatgatagggtttttgggatttgtatttacatcaagtacaggtgacatattcatatttacacctatttctataagctcatctgccattaaaagggcatttgaccttactgcatcttctgaacctgctcttcccaactcgccataagaaggatactgtctgaaaggaggtttgagcctgaacactcttccaccttcctgatcaattgcgattaatagagggattttatggcttttaattgataattcctgaagggaattgcataaatctttaacctgtgacggagactctatatttcttgaaaataggattacccccccgaccccataatcagttattattccttttaactcatctgacatagtagtcccatgaaatcccaccataaacatctgcccgattttttcttttaaagatattattgacatggtatcaatctaaaataacaaggagtgattttgcaatcataatcttacaggatttggtattgacaagtaaatagatttacctataatgaagatgaaattattgaaccttaataaaacctgacaatgcaaggacaaaaacttggtatagatttaggcggtaagcatgtcggtcttgctgttgtaagaacaccgataaacgaggtggcacattactgcactattgaactcagagaagacattaaggataagatggatgagaggaggtctcttcggagggcgaggagaaacaggctctggcatagggaagcgaggtttgacaataggcaattaagggtgaaatgcaaatatattgataaagatacaggcgaaatctgcggagctaatactccaaagaaatccaatgtaaaacatcttctacttgagaatatactcgtcaatcttaaaatagctgatgaatctaaagaggaaatcagaagaagagggctggacagagacacaaacaaaagtgaattacagacaatccttgagaaattttcaataaataccttcctgaaaaaacagattaaagacatcattcttgaaaagggggaagggagggctgtcttttgcagagagcatatcccctttcattatgaacaggttgcaacagaggctgagagtttctggctgtcaaattcaataagggctaaacaggaccagatactctcccgccttaaaagaatagcaaaggattttaagatagatgaggtggttattgaaagggcgaactttgatttgcaaaagctccagagacctgatgagatagaagcacctgaagattacatgaagggtcctaacttcgggcacagaaacaggtttgaggcattgaagcaggaatatggcaaccgatgctgtttctgcggaaagaagggtggagatgaagtaaagctgaagatagggcatctctatccgaaggctaaagatgagataaacaggtgggaaaaccttataactatatgtgaaaaatgtaatgcgaagcagggtaaaaggacaccagaggaggcagggatggaatttgtaattgtaaaggagaaggtttttaatcctgcagcaggaagggtaatacccataaaaagagaactcaagccgaagcccataaatgaatcaaaggttaataaatatatgacccatactgatattggcataaggaggctcaaaagagaaatccagaatatttttggaagcatacctataagagaaacatacggctatatcacatcgtattttagaaataaatgggagcttgaaaaagaacattataatgatgctgtagtcatagcctctgacaaagaagatttgaatataaaacctgtatttaaagatgcagtccctcagacaattaaatcatctatcaagggcgggaaactctttgatacaaatcccctccagtttagtgatggaaagttttaccagaacataacccttataggcagaaaggcagggatgcgttcatcaaaacataaaaggggtcagaggaatatcaggaactatggctcaatttatatggatgagattgaacttataacctcagaatggaagaaaaaggttctctgcgaattaagagataaacttggttatgtaaaaggagataagaataagtcttttaagcctgaggaactgatgaatgcaaatctgcctttcaggactgtaactattgacaaaaggggtgtaggagaatcttcaacccgcttaatcaataacaatgtattccgtgcctcagctgaagtaaatacgcatataatggtctattcaaataatgacggtagaatgaaggcatttgcagtaaaaaatcctaagatatttaaagatgccggactccctcatgattttcaaaaaaagatattcattgtaaaaaagggggatattgttacatggaaaaaaagtgaagatggaattgccgtaacaggcagggtgaccaaatgtttgacaaaaaatggggtaattgatataaaggacatgaataataaaatacactcagggaaaaaccctgtgtatattgaaaagatagtatctcctgaaaggggtgctatttttgagagaaaatctctttctgctctttgaaaattagatattaaagattgaaaacagcctgagtgttgaaacagacactaagttgttgggaacaggtaaagaactacggcggggtatcttgaatggttaccagctccgccctcttgtagtttttgagtaggaagactcgcccctttggggaaggaaaatggtcggtaagccactgataaggccatctacaactcatagacatgccctgtccgacaaccttggcaagggaaaccattaaattatctaatatcatattttaatctaaatacagtggcattaaaaccagaattagtaattgagaagatttcaatctaacacagtggcattaaaactacgacctatcctaattattgatacagcgaaacaatatttcaatctaacacagtggcattaaaacccataaaaagggctatcttttataatgggttatcatttgaagggggagttttaccctatcaacctataataatgacttcctcctatgcaatgggaatgttataattataaaaatatcaggagattaatatgacaaacacattggaaatagacagagatatatataatatacttattaattcctttggtgaaaatacgctgagggaaaaaatagatgatattctcctgtccgcgatggatagcttgctggaaaaatacactcgtaacatattggtatttgaagaaaagtatggggtctcttttaaagaatttgaaaaaatgtgggatgaagggaaaattgataataaacataaccacgaaatagaaggggattttattgattgggaaatgttagagatggaaaaaaaagagttgttatcagcactgtccagactcaaaggctttaaaaaatgaacaaccccaatgttgatgaattcctatcatcactaaagacctttctaaagaactattttacacaatataaaattgatttcttgataaaaacaccgaaatcccttaaagccaatattcatcttaatgagaaattttttattgcagttcgatataatgccagaaatgggagaatggactttgctttaatacaggataacaaaagaatttttggatatgataatttaaaggaatggcactatcacccttataaaaacccatcagagcatatctcatgcgataaaccatctacagataaaatcttatatgaaattaaaaaagtttttgaagatgctaaatgaggcatgaaaaaacgaaggagaaacctcatagaatgaaaaaaataataattgcaattacaggtgcgagtggtgctgtatatgcaaaatacctttttgatttcctttgcaaaaaaggtattgacctgcatattatcatctcagaaaatgcaaaaggaatattaaaggatgagacagggataggcgagaattattttaaaaagaagaaagtatcaatatatgaaaattcaaatctaaatgtccggatagcaagcggctcttttaaatttgatggtatggtcgtcatccctgcaagtatggggactcttgggagaattgcgaatggttattccaataatctaataagcagggttgctgatgttgcattaaaagagagaaggaagctgataatagtcccacgtgagacccccttaaatgatattcatataaaaaatatgctcaccttaagccgtgccggtgcagtaatactccctgcatcacctgccttctatcataagccgaaaggtattgacgatatagcaaaatttatcacagcaagaattctcaatcagcttgatatagataatgacctcatccctccatatgcaagagagggttaagataatactattttacctttgcacccaccttgacatccccatcaaatccaataagaaccaacctcccgtctccacctgctgccaataccatcccctgcgattccgtgcccatcagttttgcagacttaaggtttgtcaccagaacaattttttttccgattaattcttcaggtgtataactttcagcaatcccagcaacaacttgtctttcctctgtccctatatctactttgagttttaggagtttttttgatttctcaatcttctctgcctgttttatctcaccaactctcaaatcaacctttgcaaattcatcaatacttattaactgcctctcctcaactgcccctgccgattctgttactgttgctgttactttatcaccaatttccattttctcctccaccctcggaaaaagctgtctccctattttaatttcaatgcctgatttaattccaccccattttattgattctttaaaatcataattttctattctatccttaatccccaattgattccatatttcctgccctgtctctggcataaatggatatatatagacagcaataatacgcagactttcagctaaagtatataaggtatttgatagtgtcccctcatccttttcactccacggtgcagacttttgagcatattcattcatatctccgatgatcttccaaatgtaagaaagtgcatgaggaaattcgagtttatacataaaactgtcaaaactgtttgcagcataactctcaaaaccttttagagcaggatcgtatttaaaataaccctgaatattctgctccatacccctatttttagcatcaatttcaggtggaatcttaccctccctatatttttttatcatattgagagtcctgcttaatagattgcccaagtcatttgcaaggtcactgtttatcctcccaatcaatgccctctgggaaaaatcaccgtcaagtccaaagggaacttctctcatcaaaaaatacctgaacgcatctaccccatatttatctatcaattcatgcggatttacaaaattccctctggactttgacatcttctcaccgttcacagtccaccagccgtgtgcaaatatattttccgggagtggcaagtccaatgccttgagcattgttgaccagtaaactgaatgggtggtgagtatatctttccccagaaggtgttggtctgcgggccaccactctttgtcattgggggcaagatattttgtagcagaatagtaattaacgagtgcatcaaaccagacataggtaacatagttctcattaaagggcagtggaataccccatgaaagcctctgctttggtcttgagatacagaggtctcccagtatgttattttttagaaaaccaagaacctcatttttacgggcttcaggaagtatataattagaatttttttcaatatattcttttaaatcttcttgatactttgacatcagaaaaaagtaattttcttcttctatgtgttccacaggacggccgcagtcggggcagttgccaccttttatttccttctctgtccagaacctctcatcagggatacaataccatcccaaataactccttttttctatcttcctttcatcaaataacttctgcaaaatatcctgcacaatcttaatatgcccttcatcagttgtgcgtataaaggcattgtttgagatgttgagtcttttccagagatttttaaaattctctaccattaaatccgcatgttcttttggtttaagacccctatctctggctgccttatctaccttctgtccatgctcatctgtccctgtcagaaaaaacacctgatagtcgcagagccttttatatcgtgccataacatccgccgctacagtggtataggcatgccctatgtgtggaatatcatttacatagtagataggtgtggttatatagaactttttcatcgtaaaattataaactccaaatcccaaattacaaataatatccaatatccaaaattctaaataatttggtcattgtgatttggttattatttgattattgatatttgggtattggaatctgttttatcccgtcaactgtaatctcttaattccctttgcttgtcctgaattttcatctatatcaattacaacagcattaaattgaccttcaccgcccgccatctcaaacttctttggcatctttgtaagaaacttctctaatgcaagttcctttctaattcctatgaccgagttggatggccctgtcattcccacatcggtaatataagcagtaccgttaggcaatatcttttcatctgcagtctggacatgtgtatgtgtcccgattacagcacttaccctcccgtccagataccagcccattgcaattttttctgatgtcgcctcggcatgcatatcaactattgtaacctttatc

SEQ ID NO: 83 - DNA, 11155 bp, Artificial Sequence
  Synthetic
  misc_feature (1)..(5657): n is a, c, g, or t
nnnnnnnnnnnnnnnnnnnnnnnnnnnnnnnnnnnnnnnnnnnnnnnnnnnnnnnnnnnnnnnnnnnnnnnnnnnnnnnnnnnnnnnnnnnnnnnnnnnnnnnnnnnnnnnnnnnnnnnnnnnnnnnnnnnnnnnnnnnnnnnnnnnnnnnnnnnnnnnnnnnnnnnnnnnnnnnnnnnnnnnnnnnnnnnnnnnnnnnnnnnnnnnnnnnnnnnnnnnnnnnnnnnnnnnnnnnnnnnnnnnnnnnnnnnnnnnnnnnnnnnnnnnnnnnnnnnnnnnnnnnnnnnnnnnnnnnnnnnnnnnnnnnnnnnnnnnnnnnnnnnnnnnnnnnnnnnnnnnnnnnnnnnnnnnnnnnnnnnnnnnnnnnnnnnnnnnnnnnnnnnnnnnnnnnnnnnnnnnnnnnnnnnnnnnnnnnnnnnnnnnnnnnnnnnnnnnnnnnnnnnnnnnnnnnnnnnnnnnnnnnnnnnnnnnnnnnnnnnnnnnnnnnnnnnnnnnnnnnnnnnnnnnnnnnnnnnnnnnnnnnnnnnnnnnnnnnnnnnnnnnnnnnnnnnnnnnnnnnnnnnnnnnnnnnnnnnnnnnnnnnnnnnnnnnnnnnnnnnnnnnnnnnnnnnnnnnnnnnnnnnnnnnnnnnnnnnnnnnnnnnnnnnnnnnnnnnnnnnnnnnnnnnnnnnnnnnnnnnnnnnnnnnnnnnnnnnnnnnnnnnnnnnnnnnnnnnnnnnnnnnnnnnnnnnnnnnnnnnnnnnnnnnnnnnnnnnnnnnnnnnnnnnnnnnnnnnnnnnnnnnnnnnnnnnnnnnnnnnnnnnnnnnnnnnnnnnnnnnnnnnnnnnnnnnnnnnnnnnnnnnnnnnnnnnnnnnnnnnnnnnnnnnnnnnnnnnnnnnnnnnnnnnnnnnnnnnnnnnnnnnnnnnnnnnnnnnnnnnnnnnnnnnnnnnnnnnnnnnnnnnnnnnnnnnnnnnnnnnnnnnnnnnnnnnnnnnnnnnnnnnnnnnnnnnnnnnnnnnnnnnnnnnnnnnnnnnnnnnnnnnnnnnnnnnnnnnnnnnnnnnnnnnnnnnnnnnnnnnnnnnnnnnnnnnnnnnnnnnnnnnnnnnnnnnnnnnnnnnnnnnnnnnnnnnnnnnnnnnnnnnnnnnnnnnnnnnnnnnnnnnnnnnnnnnnnnnnnnnnnnnnnnnnnnnnnnnnnnnnnnnnnnnnnnnnnnnnnnnnnnnnnnnnnnnnnnnnnnnnnnnnnnnnnnnnnnnnnnnnnnnnnnnnnnnnnnnnnnnnnnnnnnnnnnnnnnnnnnnnnnnnnnnnnnnnnnnnnnnnnnnnnnnnnnnnnnnnnnnnnnnnnnnnnnnnnnnnnnnnnnnnnnnnnnnnnnnnnnnnnnnnnnnnnnnnnnnnnnnnnnnnnnnnnnnnnnnnnnnnnnnnnnnnnnnnnnnnnnnnnnnnnnnnnnnnnnnnnnnnnnnnnnnnnnnnnnnnnnnnnnnnnnnnnnnnnnnnnnnnnnnnnnnnnnnnnnnnnnnnnnnnnnnnnnnnnnnnnnnnnnnnnnnnnnnnnnnnnnnnnnnnnnnnnnnnnnnnnnnnnnnnnnnnnnnnnnnnnnnnnnnnnnnnnnnnnnnnnnnnnnnnnnnnnnnnnnnnnnnnnnnnnnnnnnnnnnnnnnnnnnnnnnnnnnnnnnnnnnnnnnnnnnnnnnnnnnnnnnnnnnnnnnnnnnnnnnnnnnnnnnnnnnnnnnnnnnnnnnnnnnnnnnnnnnnnnnnnnnnnnnnnnnnnnnnnnnnnnnnnnnnnnnnnnnnnnnnnnnnnnnnnnnnnnnnnnnnnnnnnnnnnnnnnnnnnnnnnnnnnnnnnnnnnnnnnnnnnnnnnnnnnnnnnnnnnnnnnnnnnnnnnnnnnnnnnnnnnnnnnnnnnnnnnnnnnnnnnnnnnnnnnnnnnnnnnnnnnnnnnnnnnnnnnnnnnnnnnnnnnnnnnnnnnnnnnnnnnnnnnnnnnnnnnnnnnnnnnnnnnnnnnnnnnnnnnnnnnnnnnnnnnnnnnnnnnnnnnnnnnnnnnnnnnnnnnnnnnnnnnnnnnnnnnnnnnnnnnnnnnnnnnnnnnnnnnnnnnnnnnnnnnnnnnnnnnnnnnnnnnnnnnnnnnnnnnnnnnnnnnnnnnnnnnnnnnnnnnnnnnnnnnnnnnnnnnnnnnnnnnnnnnnnnnnnnnnnnnnnnnnnnnnnnnnnnnnnnnnnnnnnnnnnnnnnnnnnnnnnnnnnnnnnnnnnnnnnnnnnnnnnnnnnnnnnnnnnnnnnnnnnnnnnnnnnnnnnnnnnnnnnnnnnnnnnnnnnnnnnnnnnnnnnnnnnnnnnnnnnnnnnnnnnnnnnnnnnnnnnnnnnnnnnnnnnnnnnnnnnnnnnnnnnnnnnnnnnnnnnnnnnnnnnnnnnnnnnnnnnnnnnnnnnnnnnnnnnnnnnnnnnnnnnnnnnnnnnnnnnnnnnnnnnnnnnnnnnnnnnnnnnnnnnnnnnnnnnnnnnnnnnnnnnnnnnnnnnnnnnnnnnnnnnnnnnnnnnnnnnnnnnnnnnnnnnnnnnnnnnnnnnnnnnnnnnnnnnnnnnnnnnnnnnnnnnnnnnnnnnnnnnnnnnnnnnnnnnnnnnnnnnnnnnnnnnnnnnnnnnnnnnnnnnnnnnnnnnnnnnnnnnnnnnnnnnnnnnnnnnnnnnnnnnnnnnnnnnnnnnnnnnnnnnnnnnnnnnnnnnnnnnnnnnnnnnnnnnnnnnnnnnnnnnnnnnnnnnnnnnnnnnnnnnnnnnnnnnnnnnnnnnnnnnnnnnnnnnnnnnnnnnnnnnnnnnnnnnnnnnnnnnnnnnnnnnnnnnnnnnnnnnnnnnnnnnnnnnnnnnnnnnnnnnnnnnnnnnnnnnnnnnnnnnnnnnnnnnnnnnnnnnnnnnnnnnnnnnnnnnnnnnnnnnnnnnnnnnnnnnnnnnnnnnnnnnnnnnnnnnnnnnnnnnnnnnnnnnnnnnnnnnnnnnnnnnnnnnnnnnnnnnnnnnnnnnnnnnnnnnnnnnnnnnnnnnnnnnnnnnnnnnnnnnnnnnnnnnnnnnnnnnnnnnnnnnnnnnnnnnnnnnnnnnnnnnnnnnnnnnnnnnnnnnnnnnnnnnnnnnnnnnnnnnnnnnnnnnnnnnnnnnnnnnnnnnnnnnnnnnnnnnnnnnnnnnnnnnnnnnnnnnnnnnnnnnnnnnnnnnnnnnnnnnnnnnnnnnnnnnnnnnnnnnnnnnnnnnnnnnnnnnnnnnnnnnnnnnnnnnnnnnnnnnnnnnnnnnnnnnnnnnnnnnnnnnnnnnnnnnnnnnnnnnnnnnnnnnnnnnnnnnnnnnnnnnnnnnnnnnnnnnnnnnnnnnnnnnnnnnnnnnnnnnnnnnnnnnnnnnnnnnnnnnnnnnnnnnnnnnnnnnnnnnnnnnnnnnnnnnnnnnnnnnnnnnnnnnnnnnnnnnnnnnnnnnnnnnnnnnnnnnnnnnnnnnnnnnnnnnnnnnnnnnnnnnnnnnnnnnnnnnnnnnnnnnnnnnnnnnnnnnnnnnnnnnnnnnnnnnnnnnnnnnnnnnnnnnnnnnnnnnnnnnnnnnnnnnnnnnnnnnnnnnnnnnnnnnnnnnnnnnnnnnnnnnnnnnnnnnnnnnnnnnnnnnnnnnnnnnnnnnnnnnnnnnnnnnnnnnnnnnnnnnnnnnnnnnnnnnnnnnnnnnnnnnnnnnnnnnnnnnnnnnnnnnnnnnnnnnnnnnnnnnnnnnnnnnnnnnnnnnnnnnnnnnnnnnnnnnnnnnnnnnnnnnnnnnnnnnnnnnnnnnnnnnnnnnnnnnnnnnnnnnnnnnnnnnnnnnnnnnnnnnnnnnnnnnnnnnnnnnnnnnnnnnnnnnnnnnnnnnnnnnnnnnnnnnnnnnnnnnnnnnnnnnnnnnnnnnnnnnnnnnnnnnnnnnnnnnnnnnnnnnnnnnnnnnnnnnnnnnnnnnnnnnnnnnnnnnnnnnnnnnnnnnnnnnnnnnnnnnnnnnnnnnnnnnnnnnnnnnnnnnnnnnnnnnnnnnnnnnnnnnnnnnnnnnnnnnnnnnnnnnnnnnnnnnnnnnnnnnnnnnnnnnnnnnnnnnnnnnnnnnnnnnnnnnnnnnnnnnnnnnnnnnnnnnnnnnnnnnnnnnnnnnnnnnnnnnnnnnnnnnnnnnnnnnnnnnnnnnnnnnnnnnnnnnnnnnnnnnnnnnnnnnnnnnnnnnnnnnnnnnnnnnnnnnnnnnnnnnnnnnnnnnnnnnnnnnnnnnnnnnnnnnnnnnnnnnnnnnnnnnnnnnnnnnnnnnnnnnnnnnnnnnnnnnnnnnnnnnnnnnnnnnnnnnnnnnnnnnnnnnnnnnnnnnnnnnnnnnnnnnnnnnnnnnnnnnnnnnnnnnnnnnnnnnnnnnnnnnnnnnnnnnnnnnnnnnnnnnnnnnnnnnnnnnnnnnnnnnnnnnnnnnnnnnnnnnnnnnnnnnnnnnnnnnnnnnnnnnnnnnnnnnnnnnnnnnnnnnnnnnnnnnnnnnnnnnnnnnnnnnnnnnnnnnnnnnnnnnnnnnnnnnnnnnnnnnnnnnnnnnnnnnnnnnnnnnnnnnnnnnnnnnnnnnnnnnnnnnnnnnnnnnnnnnnnnnnnnnnnnnnnnnnnnnnnnnnnnnnnnnnnnnnnnnnnnnnnnnnnnnnnnnnnnnnnnnnnnnnnnnnnnnnnnnnnnnnnnnnnnnnnnnnnnnnnnnnnnnnnnnnnnnnnnnnnnnnnnnnnnnnnnnnnnnnnnnnnnnnnnnnnnnnnnnnnnnnnnnnnnnnnnnnnnnnnnnnnnnnnnnnnnnnnnnnnnnnnnnnnnnnnnnnnnnnnnnnnnnnnnnnnnnnnnnnnnnnnnnnnnnnnnnnnnnnnnnnnnnnnnnnnnnnnnnnnnnnnnnnnnnnnnnnnnnnnnnnnnnnnnnnnnnnnnnnnnnnnnnnnnnnnnnnnnnnnnnnnnnnnnnnnnnnnnnnnnnnnnnnnnnnnnnnnnnnnnnnnnnnnnnnnnnnnnnnnnnnnnnnnnnnnnnnnnnnnnnnnnnnnnnnnnnnnnnnnnnnnnnnnnnnnnnnnnnnnnnnnnnnnnnnnnnnnnnnnnnnnnnnnnnnnnnnnnnnnnnnnnnnnnnnnnnnnnnnnnnnnnnnnnnnnnnnnnnnnnnnnnnnnnnnnnnnnnnnnnnnnnnnnnnnnnnnnnnnnnnnnnnnnnnnnnnnnnnnnnnnnnnnnnnnnnnnnnnnnnnnnnnnnnnnnnnnnnnnnnnnnnnnnnnnnnnnnnnnnnnnnnnnnnnnnnnnnnnnnnnnnnnnnnnnnnnnnnnnnnnnnnnnnnnnnnnnnnnnnnnnnnnnnnnnnnnnnnnnnnnnnnnnnnnnnnnnnnnnnnnnnnnnnnnnnnnnnnnnnnnnnnnnnnnnnnnnnnnnnnnnnnnnnnnnnnnnnnnnnnnnnnnnnnnnnnnnnnnnnnnnnnnnnnnnnnnnnnnnnnnnnnnnnnnnnnnnnnnnnnnnnnnnnnnnnnnnnnnnnnnnnnnnnnnnnnnnnnnnnnnnnnnnnnnnnnnnnnnnnnnnnnnnnnnnnnnnnnnnnnnnnnnnnnnnnnnnnnnnnnnnnnnnnnnnnnnnnnnnnnnnnnnnnnnnnnnnnnnnnnnnnnnnnnnnnnnnnnnnnnnnnnnnnnnnnnnnnnnnnnnnnnnnnnnnnnnnnnnnnnacgtgggcgacctgggcgtgctggcgggcgcctggggctgggccttggccaacggcccgggcctgggcatcccggcacccgagccggccagcctggtcctgctgggcctgggcgctctggcgctgatccgccggcgccgctgacgggtgtacagccgccgccatgacgagcaaaggaaaccggcgcccccaggcgccggtttcctttgcgtctgctttggaccaactctacgcgatagcccggctgggccggggccgcgacggagccgtcgggatcaaagttccttgttgatcagcgtataactgtcatgccagtcgttgtttgggccgccttgctcccagatcttcagcgcggcgccccagttgactagcaggaggtccatgatgacgctgctggtgcgcggctcgacgtgggcgtcgttgaacatcacgttgaaggtgggcttatagtacccgccgcgggccgtgtgcaccgagatggcccagggcaagaccgactggtcgatcatcaacgccttgtcgttctccatgctcgagaacgtccggaaagcgatgtcccactgcgtgccgtacaacttgccccaggcgttgaaccagtagcccatgcggaccatggagctccagttgtcccacgtgccccatttcatcagcacgttgggctgcaccctgcgattgtagatgtactcgtcatagacgaaccagttgttcgtctgcgccgggcaatagaagaatcgcgggctgtcgatgaaccccgcatcgtagatgatccccacgccgcggaaccgctgcttgagggtgacggggtccaggtcgttgaccttggaggcccacatggtgttctcgacgcaagggaacatgccgttgacgtagggcgccccgctcttgaacgccatccggtacggcgggtacttgtccgagctcacctcgctgtacatgagcatgcccttgccggtggaattctcgttggagctgcacactatctgcttggcgatgtccttggccaggttcaggctgggggccaggatcgagatcagcagcgagatgatcgcgatcacaaccagcaactcgacgagggtaaacgctttacgcaccatggtcagcctcctacgcgctcaaaacccaggcccgggcacaagcggtcgcccgtgctttaccggacccgccagtcacaaccttattgtacaaccttttgcagtctcccgcaagccaccccggccgggctctggggccaggttccggtcaggatgcgcccgttatcggcccggttattgttcaagccccaggcttctccagggccgcagggccagaaggcgcttgtcctctctattatcgtaacgaagagccaaaaacctttcaagcccccgtatcgacaattcctgcaacggatgggtgattcatagggggtggtgtcctcaatcccgacgccggattggccgccgacgttgcggtcacaggcggctccgccgaaggcaggccaacgcagccaaactgtcctccctacggcgccaggatgccggcgccggccacgggagtcatgatcctcgccccaaaatccagccctcgcggctcatagaagtccttccgcaggtggtgcataagacgatcgaccgcctcgcggcgcaccaggaccatcatgcttccgcccaggcccgcccccgccagttgcgccccgatcacgccctccacctggctcgacaggtccaccagggcgtccactgcctccgtgctgcacgcgtaccggccgcactgctgcgccaggtccgcctgctgggccgccagttggcccagaaccttctcatccagccgggtccgccacgcgcgaacctgcccgccgcggcggaggctgacgcggtccccgtcgtggctggcgtgcatgtaccgccccagccccgccaactcgccccgcgacagcagccgcccgtattgctgcgcccggacgatctccgacagcccaaacatcgccaccccgcgtaggtcgtagccgccgcgatggcgatgcgtgctgaagatccgctccagcgccgcctgctggtcagggaacatcgtccgcagttgtggccgcgtggcccgctccggcagtcgcgacagcgcccggtacaactcatcgacgcccaggttcagccgatccggcgtcaggtcgcgcaggtgctcggccgacgccgcggggggccagtgcttccgcaggtgcatctgggccagctcatagcaggccacccgctggttgaaggcgtcgcgggcgctgtcgctcttgagggcccgctggccgctgtaggccaccaccaggctcaggtccgacggaaagctcacctgcccctgtagcccgaaggggaaaaagccgattcgcgccacgcgccccgcctgggcgcggcagatggcggcgtggtcggcgctgcccccgcgcgagccgacgaaccattctccttccccgcacaggtcgatgaagtcggtggagctcacgtgcaggccgttgagccgcaccgcggcctgcgcaaaggccaccaccagcgccgaactgcttgacaggcccgaacccatcggcacgtcgcccgacacgaagcagtccatcccccgcaggcgggcctgggggcactcgtgctgaagccgcagcagcggcgcgcgggcgtagtggctccagtcgcccggggccgcctggagcaccgcctgtgccgcctgcgactggatcacgtccatccagtccgaccagctatacccgcgcaagagctgcgcgagggtaaactgccgcggagggtggtcctccctcgcgttgcgcaggcgcaccaggtcgtcctcgcgcggcgcggccgccaggagcgcctcgcaactgatcgccatcacgttgaccatgcccccgcggtggtcgatgtgccggcccatcaggttgatccgcccgggcgcgcggaccaccagcaccggccggtcgggcccgtaatgccgcgcgaaacccttgagcaccgagacgaacgctcgctggcgccgtcgttgcagggcggcgtcgtccccgtaaacctcgcgcaggaacgaccgccaggcccgcggctgggcctcgatcagctccagccagcggcgagccggcttgagcagccgggcagccggcttggccaggaccggggaaacccgtgggggcttctgccgcgccagcagcgcctgctccaccgccaccagctccgccggcgtgttgaaggccatcaggtcggccggatcctccaccggcatcgtctgaacggggtgcgactgggcgatcagccccatcgcgtcggtcaggtatagctcgccctggctgttgtcgcccgagagccggcgcagggcctcccgcaggcggtccaggcgcacgcagtacagggacgcgttgacgctcggagcctcctgctccagccgcgcggcgtccagcaggcggttgcccaggcggatccggcggcccgtgcggaggtgctcgtcgatgtcgctcttctcgacaatgcccgcaaaccgccccaggcggtcggccaccacgcgcccggcggtggagtccgccgcgcggggcaggacggtgaccacggcgtcggcccggctgcggcggtactcctccagaagctgcatgatgatgtgcggctggatgatcttgtcgcccatgaccaccacggtcgggccggtgtagccctgggcggccagggcctccgccgccacgcagaccgcgtgtccggtgccgcgggggatgggttgaaagacgaacatcgtctccgggtgctcggaggcgacggtgtccatcacctgctcggccatctgccccacgaccacgacgaagcgtttcagccccgcggcggcgtaggcgtccatggcccgcaggatggccggccgtccggcgatggggaaacacgccttgtgccgcccggccgaggccatgcgcttgccccgcccccccgccaggatgatgcaagcgaactcttcactgttgaccatgacggttccgtcgcggacgaccgccgctacccgcccgacgcgggcagcctccgcaacggatgatacccgtctggacccaaggagccaatccttgcctcgtcaatgacagccggacacgcccagcgcggcgctgggggcgcgaggcagccaacaagcatggcagactggcttacgcggcgcctcagccaagtcgggcaggcaaccttgcccgcgcaaagaggtcgtgcaacccgggctattgcccgacacttcatgctgggcacggctcctacacggggcacaggtggaagtgccaggttatcgttggaatggcaccctcgaaaatgttgcaagaatcggcggcccaccttcttccctcgaacccagagttgggttagactgtagtctcgcaacgccttgggcaactcatggaaaacgtgctggggatagatctgggcgggaagttcgtcgggctggcagtcgtcaggcagccggataatcacgtcctatggtgcggtaccctgcacctgtctgacaagatcaaggacctctacgacctccgccgtgtcctccgcagggccagacgctccagggtccgctatcgcaagccaaaggtgccccagcgtggaggcggcgcctcaggcagcggggcggacggagctacctatttctaccgtcgggccaaggggctcaaccagtccctacggaccaagtgcaagcacgtagacccacagaccggggaagtctgcggcaagaacaccccccgtgccgccaatgtccggcatttgctgctggaggacatcctgggcttcgagcctttcaaggccgtccccgaatcctaccgccaggccctgctggaagtgttggcggcaacacaaggcacgccccgaaagcagcagcggcttaagaacatccttgcccaggtggacgtggacagctatctcaagaagcaggtgatcgacatcatctgcaacgacctcgatggccgctgcgagttctgccgggaccacctgctggcccaccaccagcagaccgccgtcccgaggcaggcgtactggctgcccccatcgatcaagctcaaacaggacttcctgctcaagcatgtccgccagcttgcccgccgcttcgacatcgacaggatcgtcatcgagcgagccaggttcgacctccagaagattgccgccggggttattgacgatccaacggagtaccagcagggcttccgcttcgagttccgcaacacccgcgccgcactcctacaggagtacgacgggcggtgctgctactgcggcaaggaagttttcggtcagaagtggcacgttgaccacgtgcagccccgccgacaggagcaagtcgatcgctgggacaacctggctatcgcttgcgagaagtgtaaccatctcaagggcgggcgcgatccagaagaagccgggatgtcctttgccgtggtgactgtcaaggcagccggcaggcccatcaagcggtcattagcccccaggcccatcgagggcagccgcatccacaagtacatgacccagaccgatcagggcatccggatgctgaagagcgccctgggggagcttc

SEQ ID NO: 84 - DNA, 13678 bp, Artificial Sequence
  Synthetic
  misc_feature (1)..(9999): n is a, c, g, or t
nnnnnnnnnnnnnnnnnnnnnnnnnnnnnnnnnnnnnnnnnnnnnnnnnnnnnnnnnnnnnnnnnnnnnnnnnnnnnnnnnnnnnnnnnnnnnnnnnnnnnnnnnnnnnnnnnnnnnnnnnnnnnnnnnnnnnnnnnnnnnnnnnnnnnnnnnnnnnnnnnnnnnnnnnnnnnnnnnnnnnnnnnnnnnnnnnnnnnnnnnnnnnnnnnnnnnnnnnnnnnnnnnnnnnnnnnnnnnnnnnnnnnnnnnnnnnnnnnnnnnnnnnnnnnnnnnnnnnnnnnnnnnnnnnnnnnnnnnnnnnnnnnnnnnnnnnnnnnnnnnnnnnnnnnnnnnnnnnnnnnnnnnnnnnnnnnnnnnnnnnnnnnnnnnnnnnnnnnnnnnnnnnnnnnnnnnnnnnnnnnnnnnnnnnnnnnnnnnnnnnnnnnnnnnnnnnnnnnnnnnnnnnnnnnnnnnnnnnnnnnnnnnnnnnnnnnnnnnnnnnnnnnnnnnnnnnnnnnnnnnnnnnnnnnnnnnnnnnnnnnnnnnnnnnnnnnnnnnnnnnnnnnnnnnnnnnnnnnnnnnnnnnnnnnnnnnnnnnnnnnnnnnnnnnnnnnnnnnnnnnnnnnnnnnnnnnnnnnnnnnnnnnnnnnnnnnnnnnnnnnnnnnnnnnnnnnnnnnnnnnnnnnnnnnnnnnnnnnnnnnnnnnnnnnnnnnnnnnnnnnnnnnnnnnnnnnnnnnnnnnnnnnnnnnnnnnnnnnnnnnnnnnnnnnnnnnnnnnnnnnnnnnnnnnnnnnnnnnnnnnnnnnnnnnnnnnnnnnnnnnnnnnnnnnnnnnnnnnnnnnnnnnnnnnnnnnnnnnnnnnnnnnnnnnnnnnnnnnnnnnnnnnnnnnnnnnnnnnnnnnnnnnnnnnnnnnnnnnnnnnnnnnnnnnnnnnnnnnnnnnnnnnnnnnnnnnnnnnnnnnnnnnnnnnnnnnnnnnnnnnnnnnnnnnnnnnnnnnnnnnnnnnnnnnnnnnnnnnnnnnnnnnnnnnnnnnnnnnnnnnnnnnnnnnnnnnnnnnnnnnnnnnnnnnnnnnnnnnnnnnnnnnnnnnnnnnnnnnnnnnnnnnnnnnnnnnnnnnnnnnnnnnnnnnnnnnnnnnnnnnnnnnnnnnnnnnnnnnnnnnnnnnnnnnnnnnnnnnnnnnnnnnnnnnnnnnnnnnnnnnnnnnnnnnnnnnnnnnnnnnnnnnnnnnnnnnnnnnnnnnnnnnnnnnnnnnnnnnnnnnnnnnnnnnnnnnnnnnnnnnnnnnnnnnnnnnnnnnnnnnnnnnnnnnnnnnnnnnnnnnnnnnnnnnnnnnnnnnnnnnnnnnnnnnnnnnnnnnnnnnnnnnnnnnnnnnnnnnnnnnnnnnnnnnnnnnnnnnnnnnnnnnnnnnnnnnnnnnnnnnnnnnnnnnnnnnnnnnnnnnnnnnnnnnnnnnnnnnnnnnnnnnnnnnnnnnnnnnnnnnnnnnnnnnnnnnnnnnnnnnnnnnnnnnnnnnnnnnnnnnnnnnnnnnnnnnnnnnnnnnnnnnnnnnnnnnnnnnnnnnnnnnnnnnnnnnnnnnnnnnnnnnnnnnnnnnnnnnnnnnnnnnnnnnnnnnnnnnnnnnnnnnnnnnnnnnnnnnnnnnnnnnnnnnnnnnnnnnnnnnnnnnnnnnnnnnnnnnnnnnnnnnnnnnnnnnnnnnnnnnnnnnnnnnnnnnnnnnnnnnnnnnnnnnnnnnnnnnnnnnnnnnnnnnnnnnnnnnnnnnnnnnnnnnnnnnnnnnnnnnnnnnnnnnnnnnnnnnnnnnnnnnnnnnnnnnnnnnnnnnnnnnnnnnnnnnnnnnnnnnnnnnnnnnnnnnnnnnnnnnnnnnnnnnnnnnnnnnnnnnnnnnnnnnnnnnnnnnnnnnnnnnnnnnnnnnnnnnnnnnnnnnnnnnnnnnnnnnnnnnnnnnnnnnnnnnnnnnnnnnnnnnnnnnnnnnnnnnnnnnnnnnnnnnnnnnnnnnnnnnnnnnnnnnnnnnnnnnnnnnnnnnnnnnnnnnnnnnnnnnnnnnnnnnnnnnnnnnnnnnnnnnnnnnnnnnnnnnnnnnnnnnnnnnnnnnnnnnnnnnnnnnnnnnnnnnnnnnnnnnnnnnnnnnnnnnnnnnnnnnnnnnnnnnnnnnnnnnnnnnnnnnnnnnnnnnnnnnnnnnnnnnnnnnnnnnnnnnnnnnnnnnnnnnnnnnnnnnnnnnnnnnnnnnnnnnnnnnnnnnnnnnnnnnnnnnnnnnnnnnnnnnnnnnnnnnnnnnnnnnnnnnnnnnnnnnnnnnnnnnnnnnnnnnnnnnnnnnnnnnnnnnnnnnnnnnnnnnnnnnnnnnnnnnnnnnnnnnnnnnnnnnnnnnnnnnnnnnnnnnnnnnnnnnnnnnnnnnnnnnnnnnnnnnnnnnnnnnnnnnnnnnnnnnnnnnnnnnnnnnnnnnnnnnnnnnnnnnnnnnnnnnnnnnnnnnnnnnnnnnnnnnnnnnnnnnnnnnnnnnnnnnnnnnnnnnnnnnnnnnnnnnnnnnnnnnnnnnnnnnnnnnnnnnnnnnnnnnnnnnnnnnnnnnnnnnnnnnnnnnnnnnnnnnnnnnnnnnnnnnnnnnnnnnnnnnnnnnnnnnnnnnnnnnnnnnnnnnnnnnnnnnnnnnnnnnnnnnnnnnnnnnnnnnnnnnnnnnnnnnnnnnnnnnnnnnnnnnnnnnnnnnnnnnnnnnnnnnnnnnnnnnnnnnnnnnnnnnnnnnnnnnnnnnnnnnnnnnnnnnnnnnnnnnnnnnnnnnnnnnnnnnnnnnnnnnnnnnnnnnnnnnnnnnnnnnnnnnnnnnnnnnnnnnnnnnnnnnnnnnnnnnnnnnnnnnnnnnnnnnnnnnnnnnnnnnnnnnnnnnnnnnnnnnnnnnnnnnnnnnnnnnnnnnnnnnnnnnnnnnnnnnnnnnnnnnnnnnnnnnnnnnnnnnnnnnnnnnnnnnnnnnnnnnnnnnnnnnnnnnnnnnnnnnnnnnnnnnnnnnnnnnnnnnnnnnnnnnnnnnnnnnnnnnnnnnnnnnnnnnnnnnnnnnnnnnnnnnnnnnnnnnnnnnnnnnnnnnnnnnnnnnnnnnnnnnnnnnnnnnnnnnnnnnnnnnnnnnnnnnnnnnnnnnnnnnnnnnnnnnnnnnnnnnnnnnnnnnnnnnnnnnnnnnnnnnnnnnnnnnnnnnnnnnnnnnnnnnnnnnnnnnnnnnnnnnnnnnnnnnnnnnnnnnnnnnnnnnnnnnnnnnnnnnnnnnnnnnnnnnnnnnnnnnnnnnnnnnnnnnnnnnnnnnnnnnnnnnnnnnnnnnnnnnnnnnnnnnnnnnnnnnnnnnnnnnnnnnnnnnnnnnnnnnnnnnnnnnnnnnnnnnnnnnnnnnnnnnnnnnnnnnnnnnnnnnnnnnnnnnnnnnnnnnnnnnnnnnnnnnnnnnnnnnnnnnnnnnnnnnnnnnnnnnnnnnnnnnnnnnnnnnnnnnnnnnnnnnnnnnnnnnnnnnnnnnnnnnnnnnnnnnnnnnnnnnnnnnnnnnnnnnnnnnnnnnnnnnnnnnnnnnnnnnnnnnnnnnnnnnnnnnnnnnnnnnnnnnnnnnnnnnnnnnnnnnnnnnnnnnnnnnnnnnnnnnnnnnnnnnnnnnnnnnnnnnnnnnnnnnnnnnnnnnnnnnnnnnnnnnnnnnnnnnnnnnnnnnnnnnnnnnnnnnnnnnnnnnnnnnnnnnnnnnnnnnnnnnnnnnnnnnnnnnnnnnnnnnnnnnnnnnnnnnnnnnnnnnnnnnnnnnnnnnnnnnnnnnnnnnnnnnnnnnnnnnnnnnnnnnnnnnnnnnnnnnnnnnnnnnnnnnnnnnnnnnnnnnnnnnnnnnnnnnnnnnnnnnnnnnnnnnnnnnnnnnnnnnnnnnnnnnnnnnnnnnnnnnnnnnnnnnnnnnnnnnnnnnnnnnnnnnnnnnnnnnnnnnnnnnnnnnnnnnnnnnnnnnnnnnnnnnnnnnnnnnnnnnnnnnnnnnnnnnnnnnnnnnnnnnnnnnnnnnnnnnnnnnnnnnnnnnnnnnnnnnnnnnnnnnnnnnnnnnnnnnnnnnnnnnnnnnnnnnnnnnnnnnnnnnnnnnnnnnnnnnnnnnnnnnnnnnnnnnnnnnnnnnnnnnnnnnnnnnnnnnnnnnnnnnnnnnnnnnnnnnnnnnnnnnnnnnnnnnnnnnnnnnnnnnnnnnnnnnnnnnnnnnnnnnnnnnnnnnnnnnnnnnnnnnnnnnnnnnnnnnnnnnnnnnnnnnnnnnnnnnnnnnnnnnnnnnnnnnnnnnnnnnnnnnnnnnnnnnnnnnnnnnnnnnnnnnnnnnnnnnnnnnnnnnnnnnnnnnnnnnnnnnnnnnnnnnnnnnnnnnnnnnnnnnnnnnnnnnnnnnnnnnnnnnnnnnnnnnnnnnnnnnnnnnnnnnnnnnnnnnnnnnnnnnnnnnnnnnnnnnnnnnnnnnnnnnnnnnnnnnnnnnnnnnnnnnnnnnnnnnnnnnnnnnnnnnnnnnnnnnnnnnnnnnnnnnnnnnnnnnnnnnnnnnnnnnnnnnnnnnnnnnnnnnnnnnnnnnnnnnnnnnnnnnnnnnnnnnnnnnnnnnnnnnnnnnnnnnnnnnnnnnnnnnnnnnnnnnnnnnnnnnnnnnnnnnnnnnnnnnnnnnnnnnnnnnnnnnnnnnnnnnnnnnnnnnnnnnnnnnnnnnnnnnnnnnnnnnnnnnnnnnnnnnnnnnnnnnnnnnnnnnnnnnnnnnnnnnnnnnnnnnnnnnnnnnnnnnnnnnnnnnnnnnnnnnnnnnnnnnnnnnnnnnnnnnnnnnnnnnnnnnnnnnnnnnnnnnnnnnnnnnnnnnnnnnnnnnnnnnnnnnnnnnnnnnnnnnnnnnnnnnnnnnnnnnnnnnnnnnnnnnnnnnnnnnnnnnnnnnnnnnnnnnnnnnnnnnnnnnnnnnnnnnnnnnnnnnnnnnnnnnnnnnnnnnnnnnnnnnnnnnnnnnnnnnnnnnnnnnnnnnnnnnnnnnnnnnnnnnnnnnnnnnnnnnnnnnnnnnnnnnnnnnnnnnnnnnnnnnnnnnnnnnnnnnnnnnnnnnnnnnnnnnnnnnnnnnnnnnnnnnnnnnnnnnnnnnnnnnnnnnnnnnnnnnnnnnnnnnnnnnnnnnnnnnnnnnnnnnnnnnnnnnnnnnnnnnnnnnnnnnnnnnnnnnnnnnnnnnnnnnnnnnnnnnnnnnnnnnnnnnnnnnnnnnnnnnnnnnnnnnnnnnnnnnnnnnnnnnnnnnnnnnnnnnnnnnnnnnnnnnnnnnnnnnnnnnnnnnnnnnnnnnnnnnnnnnnnnnnnnnnnnnnnnnnnnnnnnnnnnnnnnnnnnnnnnnnnnnnnnnnnnnnnnnnnnnnnnnnnnnnnnnnnnnnnnnnnnnnnnnnnnnnnnnnnnnnnnnnnnnnnnnnnnnnnnnnnnnnnnnnnnnnnnnnnnnnnnnnnnnnnnnnnnnnnnnnnnnnnnnnnnnnnnnnnnnnnnnnnnnnnnnnnnnnnnnnnnnnnnnnnnnnnnnnnnnnnnnnnnnnnnnnnnnnnnnnnnnnnnnnnnnnnnnnnnnnnnnnnnnnnnnnnnnnnnnnnnnnnnnnnnnnnnnnnnnnnnnnnnnnnnnnnnnnnnnnnnnnnnnnnnnnnnnnnnnnnnnnnnnnnnnnnnnnnnnnnnnnnnnnnnnnnnnnnnnnnnnnnnnnnnnnnnnnnnnnnnnnnnnnnnnnnnnnnnnnnnnnnnnnnnnnnnnnnnnnnnnnnnnnnnnnnnnnnnnnnnnnnnnnnnnnnnnnnnnnnnnnnnnnnnnnnnnnnnnnnnnnnnnnnnnnnnnnnnnnnnnnnnnnnnnnnnnnnnnnnnnnnnnnnnnnnnnnnnnnnnnnnnnnnnnnnnnnnnnnnnnnnnnnnnnnnnnnnnnnnnnnnnnnnnnnnnnnnnnnnnnnnnnnnnnnnnnnnnnnnnnnnnnnnnnnnnnnnnnnnnnnnnnnnnnnnnnnnnnnnnnnnnnnnnnnnnnnnnnnnnnnnnnnnnnnnnnnnnnnnnnnnnnnnnnnnnnnnnnnnnnnnnnnnnnnnnnnnnnnnnnnnnnnnnnnnnnnnnnnnnnnnnnnnnnnnnnnnnnnnnnnnnnnnnnnnnnnnnnnnnnnnnnnnnnnnnnnnnnnnnnnnnnnnnnnnnnnnnnnnnnnnnnnnnnnnnnnnnnnnnnnnnnnnnnnnnnnnnnnnnnnnnnnnnnnnnnnnnnnnnnnnnnnnnnnnnnnnnnnnnnnnnnnnnnnnnnnnnnnnnnnnnnnnnnnnnnnnnnnnnnnnnnnnnnnnnnnnnnnnnnnnnnnnnnnnnnnnnnnnnnnnnnnnnnnnnnnnnnnnnnnnnnnnnnnnnnnnnnnnnnnnnnnnnnnnnnnnnnnnnnnnnnnnnnnnnnnnnnnnnnnnnnnnnnnnnnnnnnnnnnnnnnnnnnnnnnnnnnnnnnnnnnnnnnnnnnnnnnnnnnnnnnnnnnnnnnnnnnnnnnnnnnnnnnnnnnnnnnnnnnnnnnnnnnnnnnnnnnnnnnnnnnnnnnnnnnnnnnnnnnnnnnnnnnnnnnnnnnnnnnnnnnnnnnnnnnnnnnnnnnnnnnnnnnnnnnnnnnnnnnnnnnnnnnnnnnnnnnnnnnnnnnnnnnnnnnnnnnnnnnnnnnnnnnnnnnnnnnnnnnnnnnnnnnnnnnnnnnnnnnnnnnnnnnnnnnnnnnnnnnnnnnnnnnnnnnnnnnnnnnnnnnnnnnnnnnnnnnnnnnnnnnnnnnnnnnnnnnnnnnnnnnnnnnnnnnnnnnnnnnnnnnnnnnnnnnnnnnnnnnnnnnnnnnnnnnnnnnnnnnnnnnnnnnnnnnnnnnnnnnnnnnnnnnnnnnnnnnnnnnnnnnnnnnnnnnnnnnnnnnnnnnnnnnnnnnnnnnnnnnnnnnnnnnnnnnnnnnnnnnnnnnnnnnnnnnnnnnnnnnnnnnnnnnnnnnnnnnnnnnnnnnnnnnnnnnnnnnnnnnnnnnnnnnnnnnnnnnnnnnnnnnnnnnnnnnnnnnnnnnnnnnnnnnnnnnnnnnnnnnnnnnnnnnnnnnnnnnnnnnnnnnnnnnnnnnnnnnnnnnnnnnnnnnnnnnnnnnnnnnnnnnnnnnnnnnnnnnnnnnnnnnnnnnnnnnnnnnnnnnnnnnnnnnnnnnnnnnnnnnnnnnnnnnnnnnnnnnnnnnnnnnnnnnnnnnnnnnnnnnnnnnnnnnnnnnnnnnnnnnnnnnnnnnnnnnnnnnnnnnnnnnnnnnnnnnnnnnnnnnnnnnnnnnnnnnnnnnnnnnnnnnnnnnnnnnnnnnnnnnnnnnnnnnnnnnnnnnnnnnnnnnnnnnnnnnnnnnnnnnnnnnnnnnnnnnnnnnnnnnnnnnnnnnnnnnnnnnnnnnnnnnnnnnnnnnnnnnnnnnnnnnnnnnnnnnnnnnnnnnnnnnnnnnnnnnnnnnnnnnnnnnnnnnnnnnnnnnnnnnnnnnnnnnnnnnnnnnnnnnnnnnnnnnnnnnnnnnnnnnnnnnnnnnnnnnnnnnnnnnnnnnnnnnnnnnnnnnnnnnnnnnnnnnnnnnnnnnnnnnnnnnnnnnnnnnnnnnnnnnnnnnnnnnnnnnnnnnnnnnnnnnnnnnnnnnnnnnnnnnnnnnnnnnnnnnnnnnnnnnnnnnnnnnnnnnnnnnnnnnnnnnnnnnnnnnnnnnnnnnnnnnnnnnnnnnnnnnnnnnnnnnnnnnnnnnnnnnnnnnnnnnnnnnnnnnnnnnnnnnnnnnnnnnnnnnnnnnnnnnnnnnnnnnnnnnnnnnnnnnnnnnnnnnnnnnnnnnnnnnnnnnnnnnnnnnnnnnnnnnnnnnnnnnnnnnnnnnnnnnnnnnnnnnnnnnnnnnnnnnnnnnnnnnnnnnnnnnnnnnnnnnnnnnnnnnnnnnnnnnnnnnnnnnnnnnnnnnnnnnnnnnnnnnnnnnnnnnnnnnnnnnnnnnnnnnnnnnnnnnnnnnnnnnnnnnnnnnnnnnnnnnnnnnnnnnnnnnnnnnnnnnnnnnnnnnnnnnnnnnnnnnnnnnnnnnnnnnnnnnnnnnnnnnnnnnnnnnnnnnnnnnnnnnnnnnnnnnnnnnnnnnnnnnnnnnnnnnnnnnnnnnnnnnnnnnnnnnnnnnnnnnnnnnnnnnnnnnnnnnnnnnnnnnnnnnnnnnnnnnnnnnnnnnnnnnnnnnnnnnnnnnnnnnnnnnnnnnnnnnnnnnnnnnnnnnnnnnnnnnnnnnnnnnnnnnnnnnnnnnnnnnnnnnnnnnnnnnnnnnnnnnnnnnnnnnnnnnnnnnnnnnnnnnnnnnnnnnnnnnnnnnnnnnnnnnnnnnnnnnnnnnnnnnnnnnnnnnnnnnnnnnnnnnnnnnnnnnnnnnnnnnnnnnnnnnnnnnnnnnnnnnnnnnnnnnnnnnnnnnnnnnnnnnnnnnnnnnnnnnnnnnnnnnnnnnnnnnnnnnnnnnnnnnnnnnnnnnnnnnnnnnnnnnnnnnnnnnnnnnnnnnnnnnnnnnnnnnnnnnnnnnnnnnnnnnnnnnnnnnnnnnnnnnnnnnnnnnnnnnnnnnnnnnnnnnnnnnnnnnnnnnnnnnnnnnnnnnnnnnnnnnnnnnnnnnnnnnnnnnnnnnnnnnnnnnnnnnnnnnnnnnnnnnnnnnnnnnnnnnnnnnnnnnnnnnnnnnnnnnnnnnnnnnnnnnnnnnnnnnnnnnnnnnnnnnnnnnnnnnnnnnnnnnnnnnnnnnnnnnnnnnnnnnnnnnnnnnnnnnnnnnnnnnnnnnnnnnnnnnnnnnnnnnnnnnnnnnnnnnnnnnnnnnnnnnnnnnnnnnnnnnnnnnnnnnnnnnnnnnnnnnnnnnnnnnnnnnnnnnnnnnnnnnnnnnnnnnnnnnnnnnnnnnnnnnnnnnnnnnnnnnnnnnnnnnnnnnnnnnnnnnnnnnnnnnnnnnnnnnnnnnnnnnnnnnnnnnnnnnnnnnnnnnnnnnnnnnnnnnnnnnnnnnnnnnnnnnnnnnnnnnnnnnnnnnnnnnnnnnnnnnnnnnnnnnnnnnnnnnnnnnnnnnnnnnnnnnnnnnnnnnnnnnnnnnnnnnnnnnnnnnnnnnnnnnnnnnnnnnnnnnnnnnnnnnnnnnnnnnnnnnnnnnnnnnnnnnnnnnnnnnnnnnnnnnnnnnnnnnnnnnnnnnnnnnnnnnnnnnnnnnnnnnnnnnnnnnnnnnnnnnnnnnnnnnnnnnnnnnnnnnnnnnnnnnnnnnnnnnnnnnnnnnnnnnnnnnnnnnnnnnnnnnnnnnnnnnnnnnnnnnnnnnnnnnnnnnnnnnnnnnnnnnnnnnnnnnnnnnnnnnnnnnnnnnnnnnnnnnnnnnnnnnnnnnnnnnnnnnnnnnnnnnnnnnnnnnnnnnnnnnnnnnnnnnnnnnnnnnnnnnnnnnnnnnnnnnnnnnnnnnnnnnnnnnnnnnnnnnnnnnnnnnnnnnnnnnnnnnnnnnnnnnnnnnnnnnnnnnnnnnnnnnnnnnnnnnnnnnnnnnnnnnnnnnnnnnnnnnnnnnnnnnnnnnnnnnnnnnnnnnnnnnnnnnnnnnnnnnnnnnnnnnnnnnnnnnnnnnnnnnnnnnnnnnnnnnnnnnnnnnnnnnnnnnnnnnnnnnnnnnnnnnnnnnnnnnnnnnnnnnnnnnnnnnnnnnnnnnnnnnnnnnnnnnnnnnnnnnnnnnnnnnnnnnnnnnnnnnnnnnnnnnnnnnnnnnnnnnnnnnnnnnnnnnnnnnnnnnnnnnnnnnnnnnnnnnnnnnnnnnnnnnnnnnnnnnnnnnnnnnnnnnnnnnnnnnnnnnnnnnnnnnnnnnnnnnnnnnnnnnnnnnnnnnnnnnnnnnnnnnnnnnnnnnnnnnnnnnnnnnnnnnnnnnnnnnnnnnnnnnnnnnnnnnnnnnnnnnnnnnnnnnnnnnnnnnnnnnnnnnnnnnnnnnnnnnnnnnnnnnnnnnnnnnnnnnnnnnnnnnnnnnnnnnnnnnnnnnnnnnnnnnnnnnnnnnnnnnnnnnnnnnnnnnnnnnnnnnnnnnnnnnnnnnnnnnnnnnnnnnnnctcaaactcatcgaactcgaactccgggacgacatcaaggacagaatggaagagcggagggcgctgcgcaggcatcgcaggcagcggaaaaggtaccgcaggcccatcgagcctgaccgccagggcggtgtcaggtccgcccccccctaccgcagagcctgcggtcagaaccgcgcatcgaccatgaaatgcatgttcgtcaatcccgtcaccggtgaaaaatgctccctcaatgctccacttaaaaagaacatccgccgcgaactcatggcaatcaccctgaagaattcggacattccaccgggtctgaaagacaatctcgtctcatgtttcgaccggaagcggaacccgcccctcagcacttctgatctcatggcccagctccggaaatggaacgccccctcgcagaccgtccgcatggttgaacaactcctgcacggcaacctgcacggccgctccgactactgccgcgcgcacctgcatgcctgcgccggagactggaccgccgagcggcactccatgcccctttcgaattccgtcctcgcaaaacactcctctctcgtcagccttcttaaaaaactgtcgaagtattacaacatcgacagagtccgcatcgaggattccaacttcgatcctgaattaatacgttccggccgcctgctggattccggggcaggagcggaccggccggatttcctcaagaaaaatactttcaaggccctgcagcacgagtatttaaaccgctgctgctactgcggcagggacggaagcagtacccgtctcgagatcgagcacgtgatcccgaaatccctcggcggttccgacacctgggagaatctcgttctggcctgcggcgattgcaactcccggaagggctggcggacccccgaaaccgccggtatggattttcacgtcctggaaggtgtgattgtcgccggcgtgccgcgccgggtttctctggaaccggtccctttcgagcgctcccggacccgcggattcatggataagaccgatcccggcaaacgaaccgtcaggaaacacctccggcaggtttttccgctggcggaattcgagttcgacttcggctacaggacttcatatctgagaaacaagtggaactgggaaaaatcgcgctgctgcgacgctgctgtgatcgcggccatggccggcggcgagataccaggcgctccccccaccattccactggaaaaatcagttttgaaatttaattccggcggcggaaaactgttcgatacatttcccgtttcaaaaaccggcgccggctacgtgcagggccgaaccctcataagccgcgacggcaggtttgccagattcacgtggggggaaattaaaagggtggcttcaccagggaaaaagcgcatccttgaaaaacttaaggagaaagccggtgtgggcgccgtatccgacgcagaccttatcccggacgaccttttagagaccctgcccttccgccgtgttaccctcaagagaaaggatgtcggcgcttccgccgtccgcgggatcaacggcaattatttcaaggcggagcaccccaactggggaacagccgtttatttggataaaaacgggaagaaaaatttcttcatgattaagaacgcaagggtatttggaaaaacacagcctcccgaagattttgccaggctccttttcatcatcaggaagggagaccgtgtgaagttcacttacaagaacaggcagcggattgaaaaagtttatgcgaacttctcgaacgggagccttaaactgcttacggccgatggcgagacaatcatgaaaagcgctaaatcctgcgtccccgccggtggacgggacatataaacccgtctcctcttcaattccccggcgccgccggatttaacatcctcattcctatcgattcgggtttgatgaaaatggaaagcccggcggtcccgcggttacctgccgagtctcccacggaggctgttatggtccccggtatcctggaagtcacggaaagaatatcttccagcacgaacttgaaattccgggaacaatccgcatttccatcgatggggaacggctccatccgggttggcgcacccgccaccgcgccccggatttccgatatcgtcctgtcccccgaatttatcacgtaggcagaatcgggacccgacctgaacatcttccttggcaaccggcccacctgtatttcctcactgctgttgtcggaaaggacgacgcgggtaaccgtgttgtccgaaaaattcgagagatagatatggcccgatgcaacgaattccatgtcctggggctgggtttgcttcagcgcaacatctctcagaatgccgccggttgcatcgaactcgaaaagatggaacctggaccccgaaaccgccacggcgaacacggacgcatcgccctggccgcgtctcgttcccaggaggaccggtgggaattccaggttaacggagaactcgtccagggaatcgtccgatgtctcgatgcgcgatattcgcgcatcggtcttgtagccgacatatatttttccgctccgcgggtgatattcgagtagagccggctggtccggaaggggtatcgaggaaatccactgacccgaagttccggaataaacgctcagcccgttgaagcccgcgtggctcaaatatatcctgcccgcctccccggccgtggcggcggccgccggcgccagccccagcgccaccggcgtaaccgtcagttccccttccattgccacgatgtatatctccggggccgccgggttccatacgactgcgtttgacgacagatcatcgcaggttatacgcagagaaccggcccccgccctgcgcacggccgcggtatccagcgcacggctgaaatccgtatcgtcttttccgtacctcgaaacaacggttatggaaaggggatcgtcccggctcgtttgagttgaaactgcgttcagggaatcatcttttccgaatagatcgcttatgtccacagatcgcccgttgaccgagaatgtcacgtccagggtcgacgcccgaacggcgctttgagtatccgaataagagagagaaatgtatcccggcagtgaggatattgtatactccgccccctgcgccggattagtgaaagctatcaccggcggcgttgaatccacaacttctccccctccgttccctcctcctccattccctccaccacctccaccacctcccccgcagccggaggccgcagccaggaagaatataattaaaatattcatcgcggcgctgtgaaaaagaaaagagactcgatatcccggcggagaaaacattccaggcacagtattatttgttaagttcaatatattcattccggaggaagaggtgcgtgctcggatttaagtgaaaggtcgatggaagcagacacgccgtaagaagttgcggtcacggtcgccgtgccttcggtctgaacggaggcggtgaatgtgactgaagctacacctccctgagtcaaggcgctggggggcaccgttcccattgaagccatgaagtttacttcggttccgtcgcgcacgggattcccttcgtagtccagcacccttgcggttaccaccgtgctgtccttcatatccgcgaccaggatgtttttgcctgccgtgagcgaaatcgattccaccgcgtttttcagtgtgaggttgacggatgaagacaca

SEQ ID NO: 85 - DNA, 14079 bp, Artificial Sequence
  Synthetic
  misc_feature (1)..(9998): n is a, c, g, or t
nnnnnnnnnnnnnnnnnnnnnnnnnnnnnnnnnnnnnnnnnnnnnnnnnnnnnnnnnnnnnnnnnnnnnnnnnnnnnnnnnnnnnnnnnnnnnnnnnnnnnnnnnnnnnnnnnnnnnnnnnnnnnnnnnnnnnnnnnnnnnnnnnnnnnnnnnnnnnnnnnnnnnnnnnnnnnnnnnnnnnnnnnnnnnnnnnnnnnnnnnnnnnnnnnnnnnnnnnnnnnnnnnnnnnnnnnnnnnnnnnnnnnnnnnnnnnnnnnnnnnnnnnnnnnnnnnnnnnnnnnnnnnnnnnnnnnnnnnnnnnnnnnnnnnnnnnnnnnnnnnnnnnnnnnnnnnnnnnnnnnnnnnnnnnnnnnnnnnnnnnnnnnnnnnnnnnnnnnnnnnnnnnnnnnnnnnnnnnnnnnnnnnnnnnnnnnnnnnnnnnnnnnnnnnnnnnnnnnnnnnnnnnnnnnnnnnnnnnnnnnnnnnnnnnnnnnnnnnnnnnnnnnnnnnnnnnnnnnnnnnnnnnnnnnnnnnnnnnnnnnnnnnnnnnnnnnnnnnnnnnnnnnnnnnnnnnnnnnnnnnnnnnnnnnnnnnnnnnnnnnnnnnnnnnnnnnnnnnnnnnnnnnnnnnnnnnnnnnnnnnnnnnnnnnnnnnnnnnnnnnnnnnnnnnnnnnnnnnnnnnnnnnnnnnnnnnnnnnnnnnnnnnnnnnnnnnnnnnnnnnnnnnnnnnnnnnnnnnnnnnnnnnnnnnnnnnnnnnnnnnnnnnnnnnnnnnnnnnnnnnnnnnnnnnnnnnnnnnnnnnnnnnnnnnnnnnnnnnnnnnnnnnnnnnnnnnnnnnnnnnnnnnnnnnnnnnnnnnnnnnnnnnnnnnnnnnnnnnnnnnnnnnnnnnnnnnnnnnnnnnnnnnnnnnnnnnnnnnnnnnnnnnnnnnnnnnnnnnnnnnnnnnnnnnnnnnnnnnnnnnnnnnnnnnnnnnnnnnnnnnnnnnnnnnnnnnnnnnnnnnnnnnnnnnnnnnnnnnnnnnnnnnnnnnnnnnnnnnnnnnnnnnnnnnnnnnnnnnnnnnnnnnnnnnnnnnnnnnnnnnnnnnnnnnnnnnnnnnnnnnnnnnnnnnnnnnnnnnnnnnnnnnnnnnnnnnnnnnnnnnnnnnnnnnnnnnnnnnnnnnnnnnnnnnnnnnnnnnnnnnnnnnnnnnnnnnnnnnnnnnnnnnnnnnnnnnnnnnnnnnnnnnnnnnnnnnnnnnnnnnnnnnnnnnnnnnnnnnnnnnnnnnnnnnnnnnnnnnnnnnnnnnnnnnnnnnnnnnnnnnnnnnnnnnnnnnnnnnnnnnnnnnnnnnnnnnnnnnnnnnnnnnnnnnnnnnnnnnnnnnnnnnnnnnnnnnnnnnnnnnnnnnnnnnnnnnnnnnnnnnnnnnnnnnnnnnnnnnnnnnnnnnnnnnnnnnnnnnnnnnnnnnnnnnnnnnnnnnnnnnnnnnnnnnnnnnnnnnnnnnnnnnnnnnnnnnnnnnnnnnnnnnnnnnnnnnnnnnnnnnnnnnnnnnnnnnnnnnnnnnnnnnnnnnnnnnnnnnnnnnnnnnnnnnnnnnnnnnnnnnnnnnnnnnnnnnnnnnnnnnnnnnnnnnnnnnnnnnnnnnnnnnnnnnnnnnnnnnnnnnnnnnnnnnnnnnnnnnnnnnnnnnnnnnnnnnnnnnnnnnnnnnnnnnnnnnnnnnnnnnnnnnnnnnnnnnnnnnnnnnnnnnnnnnnnnnnnnnnnnnnnnnnnnnnnnnnnnnnnnnnnnnnnnnnnnnnnnnnnnnnnnnnnnnnnnnnnnnnnnnnnnnnnnnnnnnnnnnnnnnnnnnnnnnnnnnnnnnnnnnnnnnnnnnnnnnnnnnnnnnnnnnnnnnnnnnnnnnnnnnnnnnnnnnnnnnnnnnnnnnnnnnnnnnnnnnnnnnnnnnnnnnnnnnnnnnnnnnnnnnnnnnnnnnnnnnnnnnnnnnnnnnnnnnnnnnnnnnnnnnnnnnnnnnnnnnnnnnnnnnnnnnnnnnnnnnnnnnnnnnnnnnnnnnnnnnnnnnnnnnnnnnnnnnnnnnnnnnnnnnnnnnnnnnnnnnnnnnnnnnnnnnnnnnnnnnnnnnnnnnnnnnnnnnnnnnnnnnnnnnnnnnnnnnnnnnnnnnnnnnnnnnnnnnnnnnnnnnnnnnnnnnnnnnnnnnnnnnnnnnnnnnnnnnnnnnnnnnnnnnnnnnnnnnnnnnnnnnnnnnnnnnnnnnnnnnnnnnnnnnnnnnnnnnnnnnnnnnnnnnnnnnnnnnnnnnnnnnnnnnnnnnnnnnnnnnnnnnnnnnnnnnnnnnnnnnnnnnnnnnnnnnnnnnnnnnnnnnnnnnnnnnnnnnnnnnnnnnnnnnnnnnnnnnnnnnnnnnnnnnnnnnnnnnnnnnnnnnnnnnnnnnnnnnnnnnnnnnnnnnnnnnnnnnnnnnnnnnnnnnnnnnnnnnnnnnnnnnnnnnnnnnnnnnnnnnnnnnnnnnnnnnnnnnnnnnnnnnnnnnnnnnnnnnnnnnnnnnnnnnnnnnnnnnnnnnnnnnnnnnnnnnnnnnnnnnnnnnnnnnnnnnnnnnnnnnnnnnnnnnnnnnnnnnnnnnnnnnnnnnnnnnnnnnnnnnnnnnnnnnnnnnnnnnnnnnnnnnnnnnnnnnnnnnnnnnnnnnnnnnnnnnnnnnnnnnnnnnnnnnnnnnnnnnnnnnnnnnnnnnnnnnnnnnnnnnnnnnnnnnnnnnnnnnnnnnnnnnnnnnnnnnnnnnnnnnnnnnnnnnnnnnnnnnnnnnnnnnnnnnnnnnnnnnnnnnnnnnnnnnnnnnnnnnnnnnnnnnnnnnnnnnnnnnnnnnnnnnnnnnnnnnnnnnnnnnnnnnnnnnnnnnnnnnnnnnnnnnnnnnnnnnnnnnnnnnnnnnnnnnnnnnnnnnnnnnnnnnnnnnnnnnnnnnnnnnnnnnnnnnnnnnnnnnnnnnnnnnnnnnnnnnnnnnnnnnnnnnnnnnnnnnnnnnnnnnnnnnnnnnnnnnnnnnnnnnnnnnnnnnnnnnnnnnnnnnnnnnnnnnnnnnnnnnnnnnnnnnnnnnnnnnnnnnnnnnnnnnnnnnnnnnnnnnnnnnnnnnnnnnnnnnnnnnnnnnnnnnnnnnnnnnnnnnnnnnnnnnnnnnnnnnnnnnnnnnnnnnnnnnnnnnnnnnnnnnnnnnnnnnnnnnnnnnnnnnnnnnnnnnnnnnnnnnnnnnnnnnnnnnnnnnnnnnnnnnnnnnnnnnnnnnnnnnnnnnnnnnnnnnnnnnnnnnnnnnnnnnnnnnnnnnnnnnnnnnnnnnnnnnnnnnnnnnnnnnnnnnnnnnnnnnnnnnnnnnnnnnnnnnnnnnnnnnnnnnnnnnnnnnnnnnnnnnnnnnnnnnnnnnnnnnnnnnnnnnnnnnnnnnnnnnnnnnnnnnnnnnnnnnnnnnnnnnnnnnnnnnnnnnnnnnnnnnnnnnnnnnnnnnnnnnnnnnnnnnnnnnnnnnnnnnnnnnnnnnnnnnnnnnnnnnnnnnnnnnnnnnnnnnnnnnnnnnnnnnnnnnnnnnnnnnnnnnnnnnnnnnnnnnnnnnnnnnnnnnnnnnnnnnnnnnnnnnnnnnnnnnnnnnnnnnnnnnnnnnnnnnnnnnnnnnnnnnnnnnnnnnnnnnnnnnnnnnnnnnnnnnnnnnnnnnnnnnnnnnnnnnnnnnnnnnnnnnnnnnnnnnnnnnnnnnnnnnnnnnnnnnnnnnnnnnnnnnnnnnnnnnnnnnnnnnnnnnnnnnnnnnnnnnnnnnnnnnnnnnnnnnnnnnnnnnnnnnnnnnnnnnnnnnnnnnnnnnnnnnnnnnnnnnnnnnnnnnnnnnnnnnnnnnnnnnnnnnnnnnnnnnnnnnnnnnnnnnnnnnnnnnnnnnnnnnnnnnnnnnnnnnnnnnnnnnnnnnnnnnnnnnnnnnnnnnnnnnnnnnnnnnnnnnnnnnnnnnnnnnnnnnnnnnnnnnnnnnnnnnnnnnnnnnnnnnnnnnnnnnnnnnnnnnnnnnnnnnnnnnnnnnnnnnnnnnnnnnnnnnnnnnnnnnnnnnnnnnnnnnnnnnnnnnnnnnnnnnnnnnnnnnnnnnnnnnnnnnnnnnnnnnnnnnnnnnnnnnnnnnnnnnnnnnnnnnnnnnnnnnnnnnnnnnnnnnnnnnnnnnnnnnnnnnnnnnnnnnnnnnnnnnnnnnnnnnnnnnnnnnnnnnnnnnnnnnnnnnnnnnnnnnnnnnnnnnnnnnnnnnnnnnnnnnnnnnnnnnnnnnnnnnnnnnnnnnnnnnnnnnnnnnnnnnnnnnnnnnnnnnnnnnnnnnnnnnnnnnnnnnnnnnnnnnnnnnnnnnnnnnnnnnnnnnnnnnnnnnnnnnnnnnnnnnnnnnnnnnnnnnnnnnnnnnnnnnnnnnnnnnnnnnnnnnnnnnnnnnnnnnnnnnnnnnnnnnnnnnnnnnnnnnnnnnnnnnnnnnnnnnnnnnnnnnnnnnnnnnnnnnnnnnnnnnnnnnnnnnnnnnnnnnnnnnnnnnnnnnnnnnnnnnnnnnnnnnnnnnnnnnnnnnnnnnnnnnnnnnnnnnnnnnnnnnnnnnnnnnnnnnnnnnnnnnnnnnnnnnnnnnnnnnnnnnnnnnnnnnnnnnnnnnnnnnnnnnnnnnnnnnnnnnnnnnnnnnnnnnnnnnnnnnnnnnnnnnnnnnnnnnnnnnnnnnnnnnnnnnnnnnnnnnnnnnnnnnnnnnnnnnnnnnnnnnnnnnnnnnnnnnnnnnnnnnnnnnnnnnnnnnnnnnnnnnnnnnnnnnnnnnnnnnnnnnnnnnnnnnnnnnnnnnnnnnnnnnnnnnnnnnnnnnnnnnnnnnnnnnnnnnnnnnnnnnnnnnnnnnnnnnnnnnnnnnnnnnnnnnnnnnnnnnnnnnnnnnnnnnnnnnnnnnnnnnnnnnnnnnnnnnnnnnnnnnnnnnnnnnnnnnnnnnnnnnnnnnnnnnnnnnnnnnnnnnnnnnnnnnnnnnnnnnnnnnnnnnnnnnnnnnnnnnnnnnnnnnnnnnnnnnnnnnnnnnnnnnnnnnnnnnnnnnnnnnnnnnnnnnnnnnnnnnnnnnnnnnnnnnnnnnnnnnnnnnnnnnnnnnnnnnnnnnnnnnnnnnnnnnnnnnnnnnnnnnnnnnnnnnnnnnnnnnnnnnnnnnnnnnnnnnnnnnnnnnnnnnnnnnnnnnnnnnnnnnnnnnnnnnnnnnnnnnnnnnnnnnnnnnnnnnnnnnnnnnnnnnnnnnnnnnnnnnnnnnnnnnnnnnnnnnnnnnnnnnnnnnnnnnnnnnnnnnnnnnnnnnnnnnnnnnnnnnnnnnnnnnnnnnnnnnnnnnnnnnnnnnnnnnnnnnnnnnnnnnnnnnnnnnnnnnnnnnnnnnnnnnnnnnnnnnnnnnnnnnnnnnnnnnnnnnnnnnnnnnnnnnnnnnnnnnnnnnnnnnnnnnnnnnnnnnnnnnnnnnnnnnnnnnnnnnnnnnnnnnnnnnnnnnnnnnnnnnnnnnnnnnnnnnnnnnnnnnnnnnnnnnnnnnnnnnnnnnnnnnnnnnnnnnnnnnnnnnnnnnnnnnnnnnnnnnnnnnnnnnnnnnnnnnnnnnnnnnnnnnnnnnnnnnnnnnnnnnnnnnnnnnnnnnnnnnnnnnnnnnnnnnnnnnnnnnnnnnnnnnnnnnnnnnnnnnnnnnnnnnnnnnnnnnnnnnnnnnnnnnnnnnnnnnnnnnnnnnnnnnnnnnnnnnnnnnnnnnnnnnnnnnnnnnnnnnnnnnnnnnnnnnnnnnnnnnnnnnnnnnnnnnnnnnnnnnnnnnnnnnnnnnnnnnnnnnnnnnnnnnnnnnnnnnnnnnnnnnnnnnnnnnnnnnnnnnnnnnnnnnnnnnnnnnnnnnnnnnnnnnnnnnnnnnnnnnnnnnnnnnnnnnnnnnnnnnnnnnnnnnnnnnnnnnnnnnnnnnnnnnnnnnnnnnnnnnnnnnnnnnnnnnnnnnnnnnnnnnnnnnnnnnnnnnnnnnnnnnnnnnnnnnnnnnnnnnnnnnnnnnnnnnnnnnnnnnnnnnnnnnnnnnnnnnnnnnnnnnnnnnnnnnnnnnnnnnnnnnnnnnnnnnnnnnnnnnnnnnnnnnnnnnnnnnnnnnnnnnnnnnnnnnnnnnnnnnnnnnnnnnnnnnnnnnnnnnnnnnnnnnnnnnnnnnnnnnnnnnnnnnnnnnnnnnnnnnnnnnnnnnnnnnnnnnnnnnnnnnnnnnnnnnnnnnnnnnnnnnnnnnnnnnnnnnnnnnnnnnnnnnnnnnnnnnnnnnnnnnnnnnnnnnnnnnnnnnnnnnnnnnnnnnnnnnnnnnnnnnnnnnnnnnnnnnnnnnnnnnnnnnnnnnnnnnnnnnnnnnnnnnnnnnnnnnnnnnnnnnnnnnnnnnnnnnnnnnnnnnnnnnnnnnnnnnnnnnnnnnnnnnnnnnnnnnnnnnnnnnnnnnnnnnnnnnnnnnnnnnnnnnnnnnnnnnnnnnnnnnnnnnnnnnnnnnnnnnnnnnnnnnnnnnnnnnnnnnnnnnnnnnnnnnnnnnnnnnnnnnnnnnnnnnnnnnnnnnnnnnnnnnnnnnnnnnnnnnnnnnnnnnnnnnnnnnnnnnnnnnnnnnnnnnnnnnnnnnnnnnnnnnnnnnnnnnnnnnnnnnnnnnnnnnnnnnnnnnnnnnnnnnnnnnnnnnnnnnnnnnnnnnnnnnnnnnnnnnnnnnnnnnnnnnnnnnnnnnnnnnnnnnnnnnnnnnnnnnnnnnnnnnnnnnnnnnnnnnnnnnnnnnnnnnnnnnnnnnnnnnnnnnnnnnnnnnnnnnnnnnnnnnnnnnnnnnnnnnnnnnnnnnnnnnnnnnnnnnnnnnnnnnnnnnnnnnnnnnnnnnnnnnnnnnnnnnnnnnnnnnnnnnnnnnnnnnnnnnnnnnnnnnnnnnnnnnnnnnnnnnnnnnnnnnnnnnnnnnnnnnnnnnnnnnnnnnnnnnnnnnnnnnnnnnnnnnnnnnnnnnnnnnnnnnnnnnnnnnnnnnnnnnnnnnnnnnnnnnnnnnnnnnnnnnnnnnnnnnnnnnnnnnnnnnnnnnnnnnnnnnnnnnnnnnnnnnnnnnnnnnnnnnnnnnnnnnnnnnnnnnnnnnnnnnnnnnnnnnnnnnnnnnnnnnnnnnnnnnnnnnnnnnnnnnnnnnnnnnnnnnnnnnnnnnnnnnnnnnnnnnnnnnnnnnnnnnnnnnnnnnnnnnnnnnnnnnnnnnnnnnnnnnnnnnnnnnnnnnnnnnnnnnnnnnnnnnnnnnnnnnnnnnnnnnnnnnnnnnnnnnnnnnnnnnnnnnnnnnnnnnnnnnnnnnnnnnnnnnnnnnnnnnnnnnnnnnnnnnnnnnnnnnnnnnnnnnnnnnnnnnnnnnnnnnnnnnnnnnnnnnnnnnnnnnnnnnnnnnnnnnnnnnnnnnnnnnnnnnnnnnnnnnnnnnnnnnnnnnnnnnnnnnnnnnnnnnnnnnnnnnnnnnnnnnnnnnnnnnnnnnnnnnnnnnnnnnnnnnnnnnnnnnnnnnnnnnnnnnnnnnnnnnnnnnnnnnnnnnnnnnnnnnnnnnnnnnnnnnnnnnnnnnnnnnnnnnnnnnnnnnnnnnnnnnnnnnnnnnnnnnnnnnnnnnnnnnnnnnnnnnnnnnnnnnnnnnnnnnnnnnnnnnnnnnnnnnnnnnnnnnnnnnnnnnnnnnnnnnnnnnnnnnnnnnnnnnnnnnnnnnnnnnnnnnnnnnnnnnnnnnnnnnnnnnnnnnnnnnnnnnnnnnnnnnnnnnnnnnnnnnnnnnnnnnnnnnnnnnnnnnnnnnnnnnnnnnnnnnnnnnnnnnnnnnnnnnnnnnnnnnnnnnnnnnnnnnnnnnnnnnnnnnnnnnnnnnnnnnnnnnnnnnnnnnnnnnnnnnnnnnnnnnnnnnnnnnnnnnnnnnnnnnnnnnnnnnnnnnnnnnnnnnnnnnnnnnnnnnnnnnnnnnnnnnnnnnnnnnnnnnnnnnnnnnnnnnnnnnnnnnnnnnnnnnnnnnnnnnnnnnnnnnnnnnnnnnnnnnnnnnnnnnnnnnnnnnnnnnnnnnnnnnnnnnnnnnnnnnnnnnnnnnnnnnnnnnnnnnnnnnnnnnnnnnnnnnnnnnnnnnnnnnnnnnnnnnnnnnnnnnnnnnnnnnnnnnnnnnnnnnnnnnnnnnnnnnnnnnnnnnnnnnnnnnnnnnnnnnnnnnnnnnnnnnnnnnnnnnnnnnnnnnnnnnnnnnnnnnnnnnnnnnnnnnnnnnnnnnnnnnnnnnnnnnnnnnnnnnnnnnnnnnnnnnnnnnnnnnnnnnnnnnnnnnnnnnnnnnnnnnnnnnnnnnnnnnnnnnnnnnnnnnnnnnnnnnnnnnnnnnnnnnnnnnnnnnnnnnnnnnnnnnnnnnnnnnnnnnnnnnnnnnnnnnnnnnnnnnnnnnnnnnnnnnnnnnnnnnnnnnnnnnnnnnnnnnnnnnnnnnnnnnnnnnnnnnnnnnnnnnnnnnnnnnnnnnnnnnnnnnnnnnnnnnnnnnnnnnnnnnnnnnnnnnnnnnnnnnnnnnnnnnnnnnnnnnnnnnnnnnnnnnnnnnnnnnnnnnnnnnnnnnnnnnnnnnnnnnnnnnnnnnnnnnnnnnnnnnnnnnnnnnnnnnnnnnnnnnnnnnnnnnnnnnnnnnnnnnnnnnnnnnnnnnnnnnnnnnnnnnnnnnnnnnnnnnnnnnnnnnnnnnnnnnnnnnnnnnnnnnnnnnnnnnnnnnnnnnnnnnnnnnnnnnnnnnnnnnnnnnnnnnnnnnnnnnnnnnnnnnnnnnnnnnnnnnnnnnnnnnnnnnnnnnnnnnnnnnnnnnnnnnnnnnnnnnnnnnnnnnnnnnnnnnnnnnnnnnnnnnnnnnnnnnnnnnnnnnnnnnnnnnnnnnnnnnnnnnnnnnnnnnnnnnnnnnnnnnnnnnnnnnnnnnnnnnnnnnnnnnnnnnnnnnnnnnnnnnnnnnnnnnnnnnnnnnnnnnnnnnnnnnnnnnnnnnnnnnnnnnnnnnnnnnnnnnnnnnnnnnnnnnnnnnnnnnnnnnnnnnnnnnnnnnnnnnnnnnnnnnnnnnnnnnnnnnnnnnnnnnnnnnnnnnnnnnnnnnnnnnnnnnnnnnnnnnnnnnnnnnnnnnnnnnnnnnnnnnnnnnnnnnnnnnnnnnnnnnnnnnnnnnnnnnnnnnnnnnnnnnnnnnnnnnnnnnnnnnnnnnnnnnnnnnnnnnnnnnnnnnnnnnnnnnnnnnnnnnnnnnnnnnnnnnnnnnnnnnnnnnnnnnnnnnnnnnnnnnnnnnnnnnnnnnnnnnnnnnnnnnnnnnnnnnnnnnnnnnnnnnnnnnnnnnnnnnnnnnnnnnnnnnnnnnnnnnnnnnnnnnnnnnnnnnnnnnnnnnnnnnnnnnnnnnnnnnnnnnnnnnnnnnnnnnnnnnnnnnnnnnnnnnnnnnnnnnnnnnnnnnnnnnnnnnnnnnnnnnnnnnnnnnnnnnnnnnnnnnnnnnnnnnnnnnnnnnnnnnnnnnnnnnnnnnnnnnnnnnnnnnnnnnnnnnnnnnnnnnnnnnnnnnnnnnnnnnnnnnnnnnnnnnnnnnnnnnnnnnnnnnnnnnnnnnnnnnnnnnnnnnnnnnnnnnnnnnnnnnnnnnnnnnnnnnnnnnnnnnnnnnnnnnnnnnnnnnnnnnnnnnnnnnnnnnnnnnnnnnnnnnnnnnnnnnnnnnnnnnnnnnnnnnnnnnnnnnnnnnnnnnnnnnnnnnnnnnnnnnnnnnnnnnnnnnnnnnnnnnnnnnnnnnnnnnnnnnnnnnnnnnnnnnnnnnnnnnnnnnnnnnnnnnnnnnnnnnnnnnnnnnnnnnnnnnnnnnnnnnnnnnnnnnnnnnnnnnnnnnnnnnnnnnnnnnnnnnnnnnnnnnnnnnnnnnnnnnnnnnnnnnnnnnnnnnnnnnnnnnnnnnnnnnnnnnnnnnnnnnnnnnnnnnnnnnnnnnnnnnnnnnnnnnnnnnnnnnnnnnnnnnnnnnnnnnnnnnnnnnnnnnnnnnnnnnnnnnnnnnnnnnnnnnnnnnnnnnnnnnnnnnnnnnnnnnnnnnnnnnnnnnnggtcttttgcagcaaacacatccccttgcatcataagcagctgacagtagaagctgaaagttcgtggctatccaacagcatcagggcaaaacaagaccaagtcatatcacatcttgagaagttagcgaaacatttttcaataagtgaagtgattctggaaagagcaaactttgaccttcagaagatacagggaatgattgagaatcctgatgattatatgcatgggttcaatttcggtcacagaaacaggtttgaagctttgaagcaggaatacggaaatcgttgctgcttctgtgggcaaacaggtggcgaaaaagtaaggcttcaaatcggacatgtttatccgaaagcaaaggaagaaattaaccgatgggaaaatctcattactatttgtgagaaatgcaacatcaaacaaggcggaagaacacctgacgaagcagggatgaagtttgcagtagtaaaagagaaagtcttcaatccagtacttggacaaataataactgcatcaagaacgctttcaccgaaaccactcagtgagtctaaaataaataaatacatgacacatacggatataggaataagaaaactaaagaagcaaattaattcaatgtttggagatatacctataaaagaaacctttggttatataacatcttattatcgaaatcactggggattggataaagagcattacaatgatgcgatagttgtcgcatctgaaaaaggtgatttaaacaagaagcctcaatccccatatataaagcccgttgttatcaatccgaagattaaaggcgagaaacttttcgacaccaatcctctacaacataagaatggcaagttctatcaacaaatatctttgataggcagaaaaaagagtgctcgttcttcaaatcataaagctggacagagaaaaataagggcatataatgcattacggattgaccagattgagttgattatgtctgcatggaaacggaaaatacttgatgagttaagagagaaactcggctatatgaagggagacaggaaaaaatacttcaagcccgatgacatcataaatgcaaatctgccattcagaactgtgaccatagaaaaactaggagttggcgagagtgcggtaagaaaaatcaagaataatgtttttcgtgtcgcttctgatgtcaatacccatataatggtttactccacgcctgactcaaaaatgaaagcgattcctatcaagaatacaagaatatttaaagatgttgacatgcatagagatttctccaagaaacttttcatagtaaaaaaaggagatgtagtctgctggaaaaacaaaggagtcgagattacaggtaaggtaatgaaatgcttgacaaagggtgcgagcattgatataaaggatatggattctgacaagacctacagcgctaagaaccctgtttgtattcagtcggttcgttcctctgaaggtaaattgctctttgaaaatagaaactcaagattgaaaaccgcctaagtgttgaaatagacactaagttgtcgaaagcaggtgaagacctacggcagggtatcttgaatggttaccagctctgccctcttggagtctttgagcaggaatactcgcccttcggggaaggaagatagtcgacagaaggccacttaattaaggctatttacaactcatagacacgtcctgtccgacaactttggttagggaaaccatttaatattttattgccctatttcaatctcacattagtggcatttaaagaggcacaaaggcatcccttatgatagtttccagttcatttcaatctcacattagtggcatttaaagatcagactctggattaatgtcgatctgaaaaaggaatttcaatctcacattagtggcatttaaagttttcagcttgtgcaaacttcttgcataaattatctcatttcaatctcacattagtggcatttaaagtttattaattttgttcattagaacaatccttcctgaatatttcaatctcacattagtggcatttaaagagttacccactctctacagcctgattcagcaataatcatttcaatctcacattagtggcatttaaaggcaaaacttctttttattttataaggtgttttgcgcctatttttagaatatcgtctgtcgatctccagtaacacaagaatcccttagggtcgacgacttattattggacgaacggaaacaaaatatgacggcattattccgatatactacctatcaatttgcatttgtaatcccaacttttttgattatatcacaggcgtgaagtacaggaagttatacgcgagtcttccacgtatttattttcatttattccaaaatgaccacctgagaagccccacattgcaaaaactcagaccaacccatatctaaatacctaccaaaacaatacaaacataaccaggacaccatgataatttcaaagcactatacacaggttaactatcaaatattttcacacgtgacagatggacgcatgaaaataacaaaacgcctacttacattttataaatgaaacatttaaaaaatgcaggacgtttttttgacagttaaaaatcaaaaataagtgctttgaaaatatcatgtttattatttttaatattatttaaaaggctctccattgatcaggaagtaattatttcttactgtagtaaaaatgtagcagaatgtatccgaattttacataatataccgaaaatactgggaagaatataataggaaattattatttaaaatcacttagttaagtcataacccaagccagaagccactttgtttaaaatgttattagaaaaatttgaagtccaggagggacaccagaaccctatgcactccctttaaaatttagtatagtagagggttaataagggtgtcaacaggcaaacaagactgttattatcatctaatgagtctttgataatttaattttttgtttgaaagaagaggggcgaaatgaagattgaacattattcttttggcaggattactattgatggaaaaacctatacctctgatgtaattatctatcccgataagataaatgcttcatggtggaggaaggcagggcataatctggaagttgttgacctcattgatgttattagtgcaaaacccgaagttctcgtaatagggactggtgcaacaggattgatgaaagttccaaatgagacaatatcgcatcttgaatcaaagggcatcgaggttcacgtgacacggacagaaaaggcggttgaactattcaataagcttcaaaaggataagaaggtaatcgcggcattgcatctgacctgttaagcgctctttctttaatctcttgagtgctccgataattgccggtccttccctgaatgataaaaagcctggtatatatggaaatagaacctctaaaactgcaaaggcctcttccacaagaattaattcaggatatttataaagacaagctactccgacaaccttatcttcaaagaatgctgcatcaacacctgcaataaatttcggattttttctaaagggaataatttttaccttatctctcagggtcatctggatggccttcgcctctacaatatttactggccagataaaagattccatagtaatatattacctgtcttactttttttaaaatagatctccagattttctatacagaattgcttaaaaaaacatccaattgaaaaaataggcaaaaattagtaatattagttttcaaccagttgcttggtaaatgagttgatttgccaggctataatgctgacttctgataaaaggtcatatgagtgaacttgagaaattaagaagagagatcgatgagatcgataatgagatccttaagcttttgaacaaaagggctaatgtcgtcattgaaattgcccatatcaaacgaaatgagaaggcaaaatattattctcctgagcgtgaacgggaaatcattgaacgtattaaagctcttaacaccggaccttttccaaatgataccctgaaagtcatttaccgggaaatcctttctgcttccctttccctcgaagaacctctaaaggttgcttatttagggccact

SEQ ID NO: 86 - DNA, 21919 bp, Artificial Sequence
  Synthetic
gaatcatttcggccaccagcgccaacagcaccagcccgatcagataccaccaaagcttctgttggttctccacccgttcgcgggccgccttttcgccgaccaccggacgggccttgactgcacctttgacgctctcatccgcacgaggttgcacggaagaaactaattccttgatatcgtccccgctcaatggccgcaggtccggctcgcgggcatccaggttggccgcgaacctgacttgggtctggccacaggtcagctcgtaaacgcccggccgttcgggggtgaacgacactgttggaagaccatcgctgccggtttggatgccggggggggccttctggccgtcgggcgtctgtagctcgaccttgtcgaccttgtgtacgatctggtaagtgaccttatcgccgacgattacattccgctggccggccgagtgctccgcccacagccgcttggccagttggtggacgaatggcacgaacacgctcttgaggcacagattgttccactccagatccatcgccgaggggaatagaatcgatttgcccttgccgagccgaatttccagcagagccgggtggccggtgctgaaacgcgccagcaccgacgccgcctgcaaccgctccacttcataatactgcgcgaactccgccagggcaaggttgcccgtatgcggcccggcgaaggggacgaagatttcgtgtttcaggtcgacgacgctgatgacggcgggctgctcgccctgccccatcgccttccggcggagtttgcacggcgccaggtcggccagggcctcgttgaaccggtcgggctggcagttctccccgcacacaaagcaaatcccgccgccgcgctcgaggaactccttgaccgcttggtgtgccgtcgaggagatgccggcgacgttggtgaagaacaccgcgtcggtctcgtccagatgcttcgcttccaactgggcggggctgacctcgctgacggagaagaagccggaccggtccttgatcggcgcggccagggccacgctgaggaagaagccgtcgttgcgggcgaactgcctggccgggtcgccgttgaccaccagcacccgcacctgcggggtaacgtgaacgcagaagtaggcgacgttgtcttcggacatcgcgtccttggccgtcaccgagatgctgccggtcacgtcgccggggtccttgaaggtatagcggaaccgaacggggacagccgcgcgcggacgaaggttgacagaggtcctttcgacgaccttttgtccgattgtgaaggctacggccgcccgcgggatgagctggttggtggtgttgacgatcttggcggaaacgacctggggcgaccctccggccacgatgagccgcggcacctgcacgcgctcgatcaggacgttcggcaactctttctcggatacgttctttaccgacagcaccgttccgttggagagcctccaattgccgccgctgtcccaggcgctgcgctgaaagtcgctgatcagaaagatctggcgccgatccttggcccgatcggacaggtaccggtcggccgccgccagtaccagcgagaggtctgtgccccgccaggaaggctggattgcctgaatggctttccgcgcctcggccgggtccgagccgatctgggaaaggggctgcaactgccgggagaaggaggcgatgccgaccttggggccctggccgagatcgcccaacagttccagggcctgctgtttggcgctttccagccggccaccgacgcgcatcgagtaggagttgtccaccaggatcaacgccgcctggttttccaacatcgcgtcgccgctgaggcccttgggcctttcccggaagaacggacgggcaaaggccagcgccagggcggccagggccaccattctcagcaggatcagcagcagttccgtcagtcggcggcggcgcaccacccgctgcgacatggtccgcaggaagcgtaccgaagagaacaccacctgccgaatgcggcgacgctggaccaggtgaatgatgagcgggaccagcgccattcccgccccgaccagaaaccattggttgataacgtccagactgcccatcagtagcttcggctccgcttgaaaaggtactccgacagcgccagctccagcggcatggaggtgtcaaacaaggtgtaatccacctttagatcggcgcatccctggcggtaccgcccatagaattcgtccatttccgacaggtagtgcgggcggacggattgaggtgccgtgagcacgcgctcatcggtttccgggtcgacgaactcggtgatctgatcgaacgggaactccagctccgccgggtcgacgatgtggaagacgatcacgtcgttgcccaggaacttgaaatgttgcagcccgctgagcacgtcgtcgggctcgtccagcaggtcggagatcagcacgatcagcccgcgtttcttgaccccttcggccagatcgtggaagggcttgccgctgcgagtgctgccgccgggctggaggttttccagctccgccagcatccggtgcaggtgcgccgtccggctccgggccggaagcagcgtgcggatctccgtatcgaacagcaccagcccggtggcgtcgcgctgggtcatcatgaagtacgccagcgaggccgccatgtagcagccgtactggagcttggtcaaattcttggagccgtagcccatggaggcgcttttatccagcaggatgtggcagttgacgttggtctcttcctcgaactgcttgatgtaataccggtcggtcttgccgtagagcttccagtccaggtggcggatctcgtcgcccggcacgtacgcccggtactcggcgaactccacggaaaagccccggtacggactgcgatgcagcccgaggatgaatccctccaccacggtcttggccagaagctgcatgttgcggatccgcgagagggtctcgaaatccaggtacttgaacgaggtggtcgtctgctgatcaggcactcttgacgcctcactctcatgcggcacgggcctggcggcccgtgcggctgctttacaggccggagctgggcttgggcacagtttccagcagcctttggacaatctgctctgacttgacccgggccgcctccgcccggaagttggtgatgatccggtgccgcagcaccggcatcgccatcgcctggatgtcgccgacggacacgccgaaccgcccgtcaagcaccgcccgggccttgcccgccagcaccagatagtgggaagcccgcagcgaagccccccaggaaacgtattccttcacgaaatccggggccccggggtgagtcggcctggacacgctggccagccgcaccgcataccgcgccaccggatcggccaccggaatctcccgcacgatccgctggtacagcagcaagtcctttccgtgcatcacgcagtccagtttttcgggccgcttgctggtggtgctgttgaccacctcgatttcgtcggccttgggcaggtagtcaatgatgacgctgaacatgaagcgatcctgctggatcgtcggcagcgggtacgtgccctcatgctcgatcggattctgcgtggccagcacgaagaacggctcgtccagcttgtaggtggttccgccgaccgtcacctggtgctcctgcatggactccagcagggctgattgggtcttcggcggcgtgcggttgatctcgtccgccaggatgatgttcgcgaagaccggcccgcgcagaaacttcaactcccgcttggcggtgctccggtcctcctccagaatctcggtgccggtaatgtcggagggcatcagatccggagtgaactggattcgccggaaagtcaaatccagcgtatctcccatggtcttgatcagcagcgtcttggccaggcccggcacgcccgtgatcaggcagtgcccgccggcgaaaaacgagatcagcacctgctcgaccacctcgtcctggccgatgatgacccggcggacctgggagaggattctgtcccgcccctcccgcaactgctggaccatctcggccgcgcgcttttcgtcaatggcttgctcaagcgattccgatggctgaatcatcgtacacaatccttacctgccgtggccgaaaccctcaaggcccttagcccaccctcgcgggcacgggcatgttctcgaccagcctagtaatgatgtcctcgaccgtcaccttgtccacgtccgcgcggaagctcagcccgatgcggtgccgcagcaccggcgccagcaccgcctggatgtcctcgggcacgacggtcatccgcccggacagcgccgcccggctcttggcccccagggcgatgtactgcgaagcccgcagcccggccccccaggcgatgtactccttcacgaagtccggggcggtcgcatccgtcggccgggaagaggaaaccaagctcacggcgtactccaccagttccggcggcacctccaccgtcaggaccagctcctgatacgccagcaggtcctgtttgctcagcagccgcttgagttccacttggccccaactggtggacttcttgatgacggtcacttcgtcgtcttcactgagatagtccatcaggatcgacagcatgaaccggtcctgctgggcctcgggcagcgggtaggtcccctcctgctcgaaggggatctgcgtcgccagcacgaaaaacggctcttccagcgggtacgtgcgcccgccgagggtgacctgcttttcctgcatggactccagcagcgccgcctgggtcttcggcggcgtgcggttgatctcgtcggccatcacgatgttggcgaagacgggcccctggacgaagcgcagctcccgccgaccggtcgagatgtcctcttccaggatctccgtcccggtaatgtccgaaggcatcaggtccggcgtgaactggatccgcttgaacgtcaggtccatgatcttggccagggaggaaatcagcaacgtcttggccacccccggcacccccgtgatcatgcagtggcctccggcgaaaaagcccgtcagcacctgctccatcgcctcgtcttgaccgacgatcacctgtttgagttgccccaccacctgcgcagtgacttccttgagcttcccggcggaaacatccaattcggccattcacttgcctccgtcacaataaagtacagtcattcttaccggtcgagaccctcaggtcgcgcgatcgcgacgcgctcccgggattcgcggcctcaaaccgggacagggctgcgcaatctctctgcgcactgcctctactcatcgccagcccatccctgggcgagacaataaacccttccaggctggcgccgtatcggccggattcatattttcccccaagtctctgaaaacgcaagatctgcgcccgcaattcaagctggcccatttcccagccgatgaaagcccaggacgtcgtccctgcgaatcgcaacccggaacgatcccgcgtctcggccgttggggccgtgaagtctgacccgggtagttcaaagttgagggcatgaaaacacggaaaccggctatgtcgcttaaagtcctcatcgtcgacccggactggcacttcctggcccaggcgagaaacgcactggaagcccgcggagacatcacagtccacgaggcccgacccgaccaggccgtccgccgagccgaacactggtgtccggacctggtgatcatcaacgccgagctgcgcgactgctgcgacggcgacctgctggagcggctcggccgactgagcccccggccggcgatcctcctgacggccggcgtggaccagttcgccaaggcctggcgggcctggcagcgcggcggcgatgagctgctgctcaagccgctgatgcaccccggcgaattgcacgtcgcagttctccacgcgcgggagaacatgctcgtcccgcaccgcctgctcatacccgctcagccggtggccgtgtcggcataacccgcccgtgccgcgctcaccacgaggcgccccggccgatggcctttgctctccacattccacggcaaggttgccttacccatgactcacgccccggcgaccggctggcggcggtaatcctcgcggaggaccatctcatccagcaggcgcttctccagcccggcgcgctcggcggcgaaggccgggtcgtcgtagaggttccgggcctcgggcagctcggccgccatgtcatatagctccccgtactccttgccggcgtagtaggtcagcttccggtcgggcgtgacgatcgtacgcaggttctcgccggcgggcgtgcggtactccacgaaggccgcgtcgcgcctgcccgggccgccgcggacgagatcgccctgggcgatgccgtccatcgccggcgggacttccacgcccagcagctccaggatcgtcgccgcgacgtcggccgagctgaagagcccctccgcccgcgccgcccgcgccccgcccggaacccgccacagcatgggcacgttgatcagcccctccagcagccacgggcccttgtgcgtcagacccatgtcgcccatgaggtcgccgtggtcggaggtgaagatgacgacggtgctgtcggccaggtgcgtctcgaccagcacgtccagcatgcgcccgacgttctcgtccaccagcgtgaccatgccgtaggtccgggcgatcatgtcgcggatctgatcctcgcgccatccccgctcgcggaactgcggcggcttgtcggccagcgagtccggtgcgagcctgggcatgacgacctgtccggggtcgtacatcttgtcgtagggccgtggcgggcagaaggggtgatgcgggtcgggaaagctcacccacagcaggaacggccggccgtcgtcggcccgctggcggaggtagtcgccgccgatcaggcccagccagttggagctgtgcgcctcggccggatacagcggcgtgaagcactcgggggcgccggtgggcgactgctcccagtcgaactggcgggccagggcctcgggataattcttcttgacccactcgtgcaggtgggcgcggttgaggttcgcgtacccgtggccgacgctgatctgcacgtactggaagccgtagtagggcccgcaccaggacgggtcgttgacgccctgctcccaggccggcccgcactcgatccccagcgcccggccgtcgaagcggttggcggtgatgcggaagtgcggcttgccgaagaaggccgtctgatagccgcgctcgttcaccgcgtcggcgatcgtccgctcgcagtccggcaggtccacgccgttgcaccagcagccgtggttccgcggcagccgcccggtggcgatggtcgcgcggttgggcatgcacacgggattactcacgtacgcccggtccaggcacaccccgcccgcggccagtcggtccaagctcggcgtgcggatgaccgggttgccgccgcagcccatgtggtcgcgccgcatctgatcggtcgtgatcaacagcacgttcaacggcttgcccattgctcgcgtcctttccacgcaaagcgcctccgccggccggggccgctgccgccaagtaagtcgaccccgtcggccgctgcaagcgcaaaacacccgcgactgcttcgcccgcccggcgacgacgggcaggattttccgagacgcagggaggcccggccggtattcttgtcgcgggcggaccggcgcccgggcgcacggccggcagccgcgaccaaacccggcgggagagcagaccatgaagaaagtaaggatgggcgtcgtgggcggcggcttcgggaagaagtttccgtggcacgagcaccccgactgcacggtcgcggccgtggccgagctcgacccgcagcgccgcaccgacctcatgcagacctaccagtgcgacaagtcgtatgagtcgctggagcggctcatccaagacggcggcgtcgacgccgtcgccctcttcacgcccgcgcccgaccacgtgcggcacgccgtcgcctgcctccgcgcgggcaagcacgtcatctccgccgtgccggcggccacgagcctggaggactgccaactcctgctggaggcggtccggcaaaccggtctgacctacatgatggccgagacgagctggtatcatcagtccgtcatctccgcacgcaagtggttcgcggaaggcaagttcggacaaatcttctacaccgaggccgagtaccaccaccccggcctggagccgctgttcttcgacgccgccggcaaccgcacctggcggtacggctttccgccgatgcactacccgacccactgcaccgcctacctcaccggcgtgaccggcgagcgaatgacccgggtgagctgcaccggctggggcgacgactcgcccatcctcaaggacaacgcctacggcaaccccttctggaacgagacggccttcttcaccaccgaggcgggcaactccttccgcgtcggcatctactggcagggccccgtcggcggctgcgagcgcggccagtggttcggccagaacctcacgttctacgacccgagccccaacggcctgggctacatcctccgccggccgtcggagcaggtcgaggccgacgacgccggcttccagcggaagctgcccatgctcgagcagtacgaccagccgcagtggtggaagacggacatgctgcccgagccgctccgccacgccagcggccacgacggatcgcacacgttcctgacccacgagttcgtcgacgccctgctgcacgaccgccccccggccgtgggcgtccgcgaggccgtggccctgaccgcacccgggatcgtggcccaccaatcggctttgaagggcggggcacagttggagatccccagcttcgacgccaagtcctaggcttgccggcctgcccggcccgcctggcccgcccatggccggagttcaacagtccacaattcaacaagtgagccatcgggagcaaaacccaagggaacgcaaaggaacgcaacgattcgcaaagattcgcaaagattcgcaacgattcgcaacgtttcgcaacgtttcgcaacgattcgcaacgattcgcaacgtttcgcaaagtttcgcaaaggggccgatgtccataactcttttcttgcaaatatgttgcgtatttcgcttcttctcattcgcgcgaattcgcgttgttcgtcgcattcgcgttctctatcttgcccactttgcccaaacggccggaaccaagctgtaccgttcgcaaccattgagtaccattgagtaccattgagtaccgttgggaaccattgagtaccattgagtaccattgggaaccgttcggaacggaggcaaaatccgcaagtccttgggctgcaaggccctgtggatttagacgtgcgataaccttgatttttcgttcacgcccgggctccgtcgttgccgttccgtggtgcctggtgcctggtgcctggtccctctctcttccccagcttacccattttgcccagacggccgtgtgccgcattctgtcgttgccgttgccgttccctagtcccgagtcccaagtccccagtccctttgccgtttctggtccctattccctggtccctagtccctgtcttttgcctactttgcccagacggccggattgggtttgtttcgcagttttgggtctttcccgggctcctggctaccggctactgactactgcttccggcgttgccgttcctgttccctgttgcccgttgcctggtgcctggtgcctggtgcctctctcatgcacttttcaaagagcgtcggcgcgcacgtgtagcgcgccctccgtactctcccggcgcgttcacgtatgcgcgcgcaaacgctttcgcatggggagggcgaagagcgtaaatcccggccggggcggcagaagaaaatctcggagaaatcggattcgcccggccggcgcgttcacattcccgcgcgcaaatgctttcccatgcaagaaagaggtgcaaagaaggaaagatttccgcttgctgcatatcgtcgcattcagtaggctttgtccgatcggggtacccgatgccgaacgtgctggggatagatttgggcggcaaagccgtggggctcgccgtggtggagcagccggacaaccgcgttgcatggtgcgggaccgtccacctttccgacaggatcaaggatctgtacgaccagcgccggacgctgcgccggggccggcgctcacgcgtgcgttaccgcaagcccaaagttgccgaacggggtggcggctcggccggtcagactcagtggagcggattcaaataccgccgggccaaggggctcaaccagtcactccggaccaagtgcaagtacgtcgaccgggaaaccggcgaagtctgcgaacggaacacgccaaagaaggccaatgtccgccatctccttatccaggacatcctgagctttcagccgttcgccgaggtgccgccggatcacagacaggtcatccgcgatgtccttgcctcgcgcgaaggtgcaggaacccggcgtaagcggctccagaacatcctcagccggctcaacgtggacacttacctcaagaagcaggtcgacgacatctgcttcaacgatctccccggccgggccgaattctgccgcaaacacatcctcgctcaccatgagcagacggacataccggcacaggccgtttggctcccgccatcgatccgcctaaagcaggactttgtcctgaagcagattcgggttctgtcgcgccgattccgtatcgacaagatcgtcatcgagcgggcgaacttcgacctccagaagattgcggcgggagtgatcgatgatccggcggaatatcaggaaggtcaccgctacggcttccggaacacccgcgcggcgatgatgcaggagtacggggcgcggtgctgctattgcggcaagagcgtggtaggcaagaagtggcaccttgaccacatcgagcccaagaagaccggcgagatcaaccgctgggataatctggccatcgcctgcgaaaagtgcaatcagcggaagggcagcaggacacccacggaggcgggcatgtccttcgccgtcgtttccgaaaacatcgcgggcaggcggatcaggcgctcattggcgcccaagcccgtggagggcggccgcatccacaagtacatgacacagaccgatcaaggcatccgcatcctgaagcgcaacctgggggcaatcatcccccatgcacccatcgaagaaacgttcggctacgacaccgcggcctggcggggcgtgtggggcctggagaaaggcaaggagaagggggaacatcacaacgacgcaattgtcatcgcctcgctgcggtcaccggaggcggggccgatcatcgaagtggacccggaagtgagccgccaggctgtcggcgggaagcggatattcgaccagaaccccatccagcgcgcaggcgacggcaaccactatcagaggatcccggtcgtcgccgaggtcggcggcatcacgccgagacaactccgggccgtggtggacgaacagaagagggcgctcctggcacgcgagttcgagcggctcgagatcaaggggaatcggtcgcttccggatagggcccgccagcgcttgcccttcaagagcgtccgcctccgcaaaagagactgcacggacgagaacgttcgcacgatgaaaagcgggcaccgcttcaaggtctccaacgtcggcgggacgcgcgtcaacgaggcactggtcgtgtaccgcacacatgcggggaaggtagcgtgctatccgatgaagaaccggcgtgccttcgggcctacacttccgccagcggactttgaaaaggagcttaggcgtttcaggcccgccgacgcggtatacgaggctggggggaaggaactagggcggatcgtcgttctctggagcagcggtcgcgtgaagctggacagtggggtaaccagggcggcgaccaaatgcttgaaaggaggtggttgagcgaaggttgtccatcttgactacggtcgcagcgtgcatgggatgaataggcccagccagcgaaggagcagccatgagcgaattctggcctcgcgtgcatgggatgaattggctcaccatcctttcctgcgacattgcagacattttggcctcgcgtgcatgggatgaatagcttagccaggcgaaggcagacaacgagcggctgattttggcctcgcgtgcatgggatgaatttccccaagtgacctacgaccccgacattgagattttggcctcgcgtgcatgggatgaattcaggagaaatcagtacaaaggctcctgtggaaattttggcctcgcgtgcatgggatgaatactgagatgtcgcgtctgccagatcagaaaagcccagggtattgtggaagtcgcctcccgaagtatcgccgcggggccaacgaccgaggtttacccatgccctctaggtcaaaagcacgcctcagcgattccccgactgttcggggaagccagggaacccaacgaaaggcgggacctggccaggagctacgtttgcaggacagccaaagacctatgccgggatgtagtgcctcgtctacccagtcccggcctcttggagtctcggcccggaagattaacgccctcgcccttcggggcagggagagaaaggtcctcgtgaggggacatcgcgtcgggcgaccacgcgatcccgaccagaaacgtcgggaagacaagccgagacatgtgcgacctgcaaaccttggctggggatagacgagattcttttcgaggagtatgtgcggtgggtcgtgtcccgaccttttgtgtcgggatggcgacccaccgttcatttcgtgtacaatcagcagccatcatgacgaaacattttgctttcttgggtttggcgttcgcggccgtgttgtcctcggcgtgtccggggcaggaggttggcgggtcggggcgggcggttccggccgcgacggcgccggccgggatcaaggccgaggcgaagtggctcttcagcggcgatggcggcgagaagtggtcggcggcggtgccgagcgtgccgggggggaaggtcgccaccatcctcgcccgggcgagcttcaaggtgcccgacccctcggccgggagcttctgggagctgacgcacaagctgccgccgcggctggagatgaccttcgccctcaacggcagggaagttcccgtgccgctgaaggggatgtactacaaggcgatccctgcgatcccggccgggatgctccacgccgggcggaacgagctgacggccaaaatccgcatcgacaaccgcccgccgcgggacgaccgccagcgggtcatgccggccttcactttcgaccgcccggaagagccgcccgagctggcccgccagaaactccgaatccagaccggcccggtgctgggcgcgttcggggcggaccacttcaccgtcacctgccgcacgagcgtcccggccaaggtgaccctgcacgccttcgacggggccaccgagacgctgcggctggtctcgcgcgaggacgaggcgggcctgttccaccgcctcatcgtgaaggcgcccaaccgggcggagcaatacgtgctcacggccgtcagcgccgccgcccagggcacctacgccacggccaccatcacccgcccggtcttcccgacgaaggacttgcgcttcgtgatcatgggcgacagccgatcccgcaccgacgactgggcgaccgtggccgcggccgtgctggccgagaggccgcaattcgtggtcttcaccggcgacatgtgcggccgagggaccaacgactgggagtgggacgaacacttcttcgcccccgaggccgcccgcgagctgctggcgacggtcccgttctacgcggtcaagggcaaccacgaggagaacgcgccggtgtacacggagctgttctgtacgcccggcggcgacgggcggggggccaactggtcccagcagatcggcccggtgctgctgatcggcatcgacgggcagtggtcgccgcggtggaagccgatctacgacggcgtcgagaagactctggccgcctcgaaggcgaagttcatcttcttcatgtcgcactatccggcgtactcctcggccgggaacggcaagctcgacgagcggaccggccagcccaggcactgggcgtacctgaccggccggcgggtaatcgtgccgatgctggtgaggcacaaggccaccgccttcgtggtctcccacgagcaccactacgagcggtcggagcttccgggggggctggtgcagatcatctccggcggggccggggcgccgcggtcgggcaggtcgccggcggccgccaggcagaacccgtacgccaaggtgttcgccaagacgctgaactactgcctggtggaggtcgccggcgagaagtgcacgctgaaggccaagacgcccgacggcaaggtcatcgacacactcacctggcaggcgcgcaagctcgactgatcggccgcatcctcttgtttccggcgaaatatctgctcgggttcttccgctgaggcggcccgtcgcggcgcggggcaaggctcggctgctccccggtcgggcagcgacgggacggcggcgaggcggttgcaccgggcaagccaagccgcgaaaagcatttgaaacgagagtggaattgcggacaattctcgtgagaagcatcggaaatgccggcggagccgctgaggcagacgcgctttccggcggccaaccgcgagcatccggtccgatgcattgggcaacgcaatcatgctgaagcgattccttgaagttctcctgcgatcgccgcgactgttccgctcgaggggcggcttcaattacgggcttctgacggttgccgccgcgtgcttcctcatcacggtcctgctgccgccgccccggagcctggtgaggctggtctccgcggagcatccggtcgggtatcgcctccagccccagacgaaaacgatcacccagagcgtcaacgggatcctcaagaccgacctgagtccggagcaggtcgccggcaaagccaagaccatgaccgtggtgctgttcacggcggcgttcctgtgggcgacggaggcgattccgctgggggcgaccgatcttctggtgggggccttgctgtaccttttcgcgattctgccgtttgacgacattgccagggcgtacatgaaggatgcggtttttttcatcgccggcgtgttgaccatcgccgtgggggtgagcgcgacggggctggaccggcgcatcggcctgcttctgctggggagaatccggagcctcaaggccttctgctttgtcttcctgccggctctggccgtcgccgccagcttcttttccgagcacgccctgaccgcgatcctggttcccatcctggtcaggatgtacctgctcatttgcgagcactatcggatcaaggcggacaggtacctcgcggtgtttctgatcctgggggtgtgtttcgcgctgaaccagggcgggcccggctcgcccgcggccggcggacggaatgcgatcatggtcggctatttgcaggactccgggtgccccatttccttcgggcagtgggtggtgattgggatgccctacgtgattgtggtctcgctggcaatcggcgccttcatgtacttgacgctgaagaggaagctgcgcgtgccggaagtggacttcgccaggttcctccaggccgaggtcaagcgtctgggcaggatgtcgaggcagcaaattctgatggccgtcattctggcgtcggtcgtgttcctatggatcaccgccagccgccgcttcggcctgggcggcccctgcgtcttcggcgtcgtcctcatgctggtgttccggatatgcagttggaaggacattcagacgcgcgtgcgatttgacgtggtcggcctgtacgcggccgcgtgcgccatgggcgtggggctgaagatgaccggggcgtcgctgtggctggcacagagcatcgtcaacagcctgccggagtccatgcgccacggggaaatgctggtgattaccgtcagcgccttcaccggggcgctgacgaacttcatgagcgacggggctacagtggcggcgatcggcccggtggcgctttccatggcccagatcggcaacgtgaacctgtggaaggtcggcctggcctgcgccttttccgcctccttcgccaatgtcaccatcgtcggcacgccgaacaacgccattgcctacgtcggggccgtggtgcccgaaaccggagaaaggctgttgagactgcgcgacttcctcatctacggcctgccggtgacgctgcttgcgtggatcgttttctgggcctgggccctttttggatattggaagctgattccgtggctttccccgtgaccgccgatcgggcggccgcggcagccccgccgctgcccgcgggcagggcgggaagagcgagccgccaccgaagggaaaacgcatgagaagtctgagctacattctgaccgggcgtcccggaaatcgaaccgactgcatcgaccacgcccggacgcacccgcccaggaagatctccatcgagctgatgacgcaggaaatactctccgaggcgttcatcgcgaagacgctgttcgtgacgtacgtgtgggtcttcgagagtctcgtggtcacgtatgaggagacttacggccgctgcttccagcacgagacgcacgaacgccaatgcgtcagcatcgacaacgccaatcgacggctgaccaaggccctggagaacctccaagagcggacgggaatgtcgatcgagggccaagacgcgcggttcgaccgcgacctggcgtaccagaagtagaagacgcccgcgatgactcttggcgtttccgctgcgccgcgccggcgcgggcagcgcggccccggcggaggcggcgctgccgccaggggcctgacctatccccagtttgccgaaccaggctgggagccgacaagtgtgcacgtggcgagagccatggaatgagacatcgcccagacaattctggtgcgtgcgagcacgcaccctacgcccggccccagccccagcggggcgtcttttttagccccgtgcgacagcacgggggaatcgccggagcaagcagcgcagccccatcggggcgtcttgagagggtggggagctaagacgcccctacggggctccagggcgacgaagccctccacctcccagggctcgcgccctgggctaagaaaggcgcccctgccggggctacccatggaactggggataagtcagcccaggcgccgcttgcacaacccgccgcccgccggcatgatgatgtcccggctgcggcggtaatggaaaagagcgcggcttgctgggcgccgcgtgcgtcttgaagtggagaatgcgggcatgtccggtcgacggatcaggaactacatgggcggccgctgggccgacgccgacgccaccgactacctggcggtgcacaaccccagcaccggcgaggtgatcgccgagactcctctttccacgccgaccgaggcggatcgcgcggtcgccgcggccgcgggggccttccccgcctggtcggccacgcccgtcgccaaacgctgcgagccgctctaccggctcgtatcgctgctgcgcgacaacgccgagagcatcaacaggacactggtggaggagatgggcaagtcgctgccggacgcccgggccgagctgaagcgggcgatcgagaactgccaggtcgcctgcggcatgcccatcctccagcagggcgataagctcgccggggtctccgagggcatcgacggagaggtgctgcgcgtgccgctgggcgtgttcgccatgatcgccccgttcaacttcccggcgatggtgccgttctggttcctgccgtacgccatcgctaccggcaacaccttcgtgctgaagccgtccgagcgggtgccgtgcacgatggcgctgatcgccgagttcatcgaccgggcgggcctgccggcgggcgtgttcaacttggtcaacggcgacaaggccgtcgccaacgcgttgatggactctccggccgtcagcggcgtctccatggtcggctcgacggcggtctgccggctggtcgccgagaagtgcgcccggacgaacaagcgcttccaggcgatgggcagcgccaagaaccacctggtggtgatgcccgacgccaagatcgaccacgtggtccgcaacatgatcacttcctgcttcggctgcgccggccagcggtgcatggcggcctcggccatcgtctgcgtgggcgagcggacccaccggcaggtggtcgagcggttcgtcgccgccgcccgggaggtgcccgtgggcgacccgctggacgcggcccacgccgacagagacgtgctgatcggcccggtgatatcggccgccgccagggagcggattcacgcgctgatcgccgagggcctcgccgagggagccacgctggccctggacgggcgcggcctcgtcgtgcccgggcgggagaagggctacttcatcggcccgacggtgttcgtcgacgtccaagcgggcatgaaggttcaccgcaccgagatcttcggcccggtggtggtcatcctgaaggccggctcgctggacgaggccatcggcatcatcaacgatcaccagtacggcaacggggcgtccatctacacccagaacggccactacgcccgccggttcaagctggaggtggaggcgggcatgatcggcgtcaacgtgggcatccccgccccggccgcgtacctgccgttcggcgggatgaagtcgtcgctgttcgcggacatcaagacccaggccggatcggcggttcggttcttcaccgacgagcggatcgtcaccgagcgctactggccggaggaatagcgccactggcgcgggcggaccgtcgggcctcgacgattggggaattggagcttgagatttgtttggagtttgaggtttgcgttttaaggtttgtttgaagtttggaatttgcgatttgagatttgtttggagcttgaggtttgtgatttgagatttccagcctccctgaggctggtagaatactctccgtccgtgcccgcacggcgcggacacgcgcacactcacttggtcgaacaaggagatcagtcttgggcaagagtttgagcattacagtcgccggcgccggcaaggccggcccgtccatggccgcgcacctgatgtcgctgggctttgaggtaaagctgtacgagcttccggccttcgcccacaagatccggccgttcatcaaacgcggcggcattcagtgcagcggcgaggtcaagggcttcttccgcccggcggccatgaccacggacgccaaggaagcggccggcgacgcggacgtggtcatggtggccgccatggccatgggccacgaggccatcgtcgccagcctgctgcggcacatgaaggacggctcgctgatggccttcaacaccggctattacgcgggtctgcgcttccatcggaagttcagtcggctgcggcggcacgtcatcctggccgagacggacatcctgccgtacctgtgcctgcggaccggcccgcacagcgtccgcatcgacggcatcaagaaggagctcggcgtggccgccatgcccgccgccgacacgccgaaagcggtccggctgctcagaaaaaccagactcctgcgcttcttcccgcgcaagcacaccctggaggtttccctgagcagcatgaacctgctgttccacgcccccatcgtgctgttcaacctggccgccagcgagaacaccaagggcaactacgtcttttaccgcgacggcgtctcgcccggcatcggccggatcatccacgccatggacgccgagcgcatcgccgtcggggccaaactcggcgtcaagctgaccgactgcgtcaccgccaccaagcgctactacaccgactacaaggtcaggggaagcactatcgatgagtgcctgcggacgaacctggcctacgccaaggacgtcttccccatgcccagcatctgcgagttcgctgtgttccatcaggacctggcctacgggctgccgcccatcgtggagctgggcaggctgctgaaggttcccacgcccgcgttcggaatgatcgtggacgtggccaacctggtttgccagaccgactacgccaaagagggtctgaacctgcggaagctcggcatcgccgggatgaggcggtccggactgctgcgctacctcaagaccggcaggagatgatccgccgccggtgacggaaaggaaccaaccgtgattaggacaaccaggcacgccgcggcattttccgttttggtgcttgcgctgggcacggcctgctgcgccggcgagacggtccggctgaaggccacggccgacatctgggtctccgccttccgcggcgaggccgaccacagcgccggcaagtacaagtccttcaagctcaagagtatccaggaaatggcggtggtgcggttcgacgcggcgcccgcggccgggcggactatccggtcggcgcggctgctgctgcaccccgacggcgagcacatgctccgctacgtccgcgtctccaccgtcagcggcgactgggtcgagggcaccaacgccgcccgcctgaccgccggagacggggccaccttcaaccacgccgacggcaaggccaagcgtccctgggcctgggcgggctcgcaactgtgcgacgtgatcatgggcgcgggcaacaccctgaccacctgggccgagcgcaagcagctcgaggacggctggatcagcgtcgagctgacgccggagctggtctacgccctggtcgccggcgacagcgacgggctggccctgatggaaggcggcacgcccaagttcttcaacaacttcatccactcggtccagtcgaagttcccgccgcgggtcgaggtggagctaggcgagcccattcaggccgccccgccgcggccgagcttccaggcgtcgcccgacccgcagagggcccacctgacgaccggggcgatcaagctgacggtggcgccggcgcccggcgtggtctgctggcgggtggcgctggacggtaagcccgtgccgcgctggaaggtcgcccatccggcccggaagggcccgacgaccttctacctggaggacctggcgccggcgcggaagtgcgagctggagctggtggccgtctcgccgggcggaaaggcctccgccccgaccaaggcctccgtgaccgcctcgccggcgctgccggcgccgccggagctgggcaagttcaacccgcccacataccgcggccccagcgcccccaagccggacacccagcccgggcaggccgcaacgcggggcgcgaggccgttcgtcgcctgggtgtgccctcccctggtcaagatcagcccggaaacgggcaaggtgatgttcaacgacgccggcgacaagggggactggcgaaggtctaatgccatccgggattacagccacgtccgcctcttcggcgcccgcggcgaatatgtctcctaccaggtcatcgtcgagaaccgcggagacaagccgttgaaggacctaaaggttctgccaagtccgctggtccgccccggcgcaaccatcgcccgcggccagatcgagctgtacaagaactggtacgcgcggaacgccaacaagcagtggcagccggcctattgcgtgccgatgaagctaggccaaggcgtggaggttcccgacccggcccgcaagatggcagaccagaaaaaccagtccttctacgtggacatccacattcccaaagacgcaaagccgggcaggtacgacgggctgctgacggtggaagtgggcggctccgggcaagtgattccggttcggctggaggtgctggacttctccctgccggagcggctcgtcttctggccgcagctcaacgcctaccaggcgcccgagggcgtgcacgactattaccgcctggcccacaatcaccgctgcgtcttctacttccgctactggcggccgaaggtcgaaggcgccggcaagaatctgcggctcatctgggacgaatacgacaag

SEQ ID NO: 87 - DNA, 21919 bp, Artificial Sequence
  Synthetic
  misc_feature (1)..(2945): n is a, c, g, or t
nnnnnnnnnnnnnnnnnnnnnnnnnnnnnnnnnnnnnnnnnnnnnnnnnnnnnnnnnnnnnnnnnnnnnnnnnnnnnnnnnnnnnnnnnnnnnnnnnnnnnnnnnnnnnnnnnnnnnnnnnnnnnnnnnnnnnnnnnnnnnnnnnnnnnnnnnnnnnnnnnnnnnnnnnnnnnnnnnnnnnnnnnnnnnnnnnnnnnnnnnnnnnnnnnnnnnnnnnnnnnnnnnnnnnnnnnnnnnnnnnnnnnnnnnnnnnnnnnnnnnnnnnnnnnnnnnnnnnnnnnnnnnnnnnnnnnnnnnnnnnnnnnnnnnnnnnnnnnnnnnnnnnnnnnnnnnnnnnnnnnnnnnnnnnnnnnnnnnnnnnnnnnnnnnnnnnnnnnnnnnnnnnnnnnnnnnnnnnnnnnnnnnnnnnnnnnnnnnnnnnnnnnnnnnnnnnnnnnnnnnnnnnnnnnnnnnnnnnnnnnnnnnnnnnnnnnnnnnnnnnnnnnnnnnnnnnnnnnnnnnnnnnnnnnnnnnnnnnnnnnnnnnnnnnnnnnnnnnnnnnnnnnnnnnnnnnnnnnnnnnnnnnnnnnnnnnnnnnnnnnnnnnnnnnnnnnnnnnnnnnnnnnnnnnnnnnnnnnnnnnnnnnnnnnnnnnnnnnnnnnnnnnnnnnnnnnnnnnnnnnnnnnnnnnnnnnnnnnnnnnnnnnnnnnnnnnnnnnnnnnnnnnnnnnnnnnnnnnnnnnnnnnnnnnnnnnnnnnnnnnnnnnnnnnnnnnnnnnnnnnnnnnnnnnnnnnnnnnnnnnnnnnnnnnnnnnnnnnnnnnnnnnnnnnnnnnnnnnnnnnnnnnnnnnnnnnnnnnnnnnnnnnnnnnnnnnnnnnnnnnnnnnnnnnnnnnnnnnnnnnnnnnnnnnnnnnnnnnnnnnnnnnnnnnnnnnnnnnnnnnnnnnnnnnnnnnnnnnnnnnnnnnnnnnnnnnnnnnnnnnnnnnnnnnnnnnnnnnnnnnnnnnnnnnnnnnnnnnnnnnnnnnnnnnnnnnnnnnnnnnnnnnnnnnnnnnnnnnnnnnnnnnnnnnnnnnnnnnnnnnnnnnnnnnnnnnnnnnnnnnnnnnnnnnnnnnnnnnnnnnnnnnnnnnnnnnnnnnnnnnnnnnnnnnnnnnnnnnnnnnnnnnnnnnnnnnnnnnnnnnnnnnnnnnnnnnnnnnnnnnnnnnnnnnnnnnnnnnnnnnnnnnnnnnnnnnnnnnnnnnnnnnnnnnnnnnnnnnnnnnnnnnnnnnnnnnnnnnnnnnnnnnnnnnnnnnnnnnnnnnnnnnnnnnnnnnnnnnnnnnnnnnnnnnnnnnnnnnnnnnnnnnnnnnnnnnnnnnnnnnnnnnnnnnnnnnnnnnnnnnnnnnnnnnnnnnnnnnnnnnnnnnnnnnnnnnnnnnnnnnnnnnnnnnnnnnnnnnnnnnnnnnnnnnnnnnnnnnnnnnnnnnnnnnnnnnnnnnnnnnnnnnnnnnnnnnnnnnnnnnnnnnnnnnnnnnnnnnnnnnnnnnnnnnnnnnnnnnnnnnnnnnnnnnnnnnnnnnnnnnnnnnnnnnnnnnnnnnnnnnnnnnnnnnnnnnnnnnnnnnnnnnnnnnnnnnnnnnnnnnnnnnnnnnnnnnnnnnnnnnnnnnnnnnnnnnnnnnnnnnnnnnnnnnnnnnnnnnnnnnnnnnnnnnnnnnnnnnnnnnnnnnnnnnnnnnnnnnnnnnnnnnnnnnnnnnnnnnnnnnnnnnnnnnnnnnnnnnnnnnnnnnnnnnnnnnnnnnnnnnnnnnnnnnnnnnnnnnnnnnnnnnnnnnnnnnnnnnnnnnnnnnnnnnnnnnnnnnnnnnnnnnnnnnnnnnnnnnnnnnnnnnnnnnnnnnnnnnnnnnnnnnnnnnnnnnnnnnnnnnnnnnnnnnnnnnnnnnnnnnnnnnnnnnnnnnnnnnnnnnnnnnnnnnnnnnnnnnnnnnnnnnnnnnnnnnnnnnnnnnnnnnnnnnnnnnnnnnnnnnnnnnnnnnnnnnnnnnnnnnnnnnnnnnnnnnnnnnnnnnnnnnnnnnnnnnnnnnnnnnnnnnnnnnnnnnnnnnnnnnnnnnnnnnnnnnnnnnnnnnnnnnnnnnnnnnnnnnnnnnnnnnnnnnnnnnnnnnnnnnnnnnnnnnnnnnnnnnnnnnnnnnnnnnnnnnnnnnnnnnnnnnnnnnnnnnnnnnnnnnnnnnnnnnnnnnnnnnnnnnnnnnnnnnnnnnnnnnnnnnnnnnnnnnnnnnnnnnnnnnnnnnnnnnnnnnnnnnnnnnnnnnnnnnnnnnnnnnnnnnnnnnnnnnnnnnnnnnnnnnnnnnnnnnnnnnnnnnnnnnnnnnnnnnnnnnnnnnnnnnnnnnnnnnnnnnnnnnnnnnnnnnnnnnnnnnnnnnnnnnnnnnnnnnnnnnnnnnnnnnnnnnnnnnnnnnnnnnnnnnnnnnnnnnnnnnnnnnnnnnnnnnnnnnnnnnnnnnnnnnnnnnnnnnnnnnnnnnnnnnnnnnnnnnnnnnnnnnnnnnnnnnnnnnnnnnnnnnnnnnnnnnnnnnnnnnnnnnnnnnnnnnnnnnnnnnnnnnnnnnnnnnnnnnnnnnnnnnnnnnnnnnnnnnnnnnnnnnnnnnnnnnnnnnnnnnnnnnnnnnnnnnnnnnnnnnnnnnnnnnnnnnnnnnnnnnnnnnnnnnnnnnnnnnnnnnnnnnnnnnnnnnnnnnnnnnnnnnnnnnnnnnnnnnnnnnnnnnnnnnnnnnnnnnnnnnnnnnnnnnnnnnnnnnnnnnnnnnnnnnnnnnnnnnnnnnnnnnnnnnnnnnnnnnnnnnnnnnnnnnnnnnnnnnnnnnnnnnnnnnnnnnnnnnnnnnnnnnnnnnnnnnnnnnnnnnnnnnnnnnnnnnnnnnnnnnnnnnnnnnnnnnnnnnnnnnnnnnnnnnnnnnnnnnnnnnnnnnnnnnnnnnnnnnnnnnnnnnnnnnnnnnagccagatgttaccggcaaaatgaaatcgattacggtcatttttgagcagaacgccgttaatacaaaagagttatatcattccgtcgcggcaacaaccggacggcagtgatgactgtccctatttttccatctcggcgaaggtgttgcggaacattatattgaggccataagagtatttgtcccggagcaggttatgaatgacaaaggcgtttaccaggaaaagtacaccaaggccaatttcattacacgccggctcatagatggattcttcaaggcgacgggcgaactgatcgcgggactggacgtgcggaccgcggtcgagttcggctgtggctaaggagtcagtacgcggcgcgtttcaaggcttttgcccgcgggcgccgtctttgaagccagcgatttcgatgagagccgtgttcaggcggctcaagcacttaatccgaacatccgctgtgcgaaagaatctctttacgaacttcacaggccggataattcattcgatctggtcatcgtgctggaagtgctggaacatctgaaaaatcctgaccgtgccctgcggggaatatgccgggttgcccgtaaatgggtgattgtatccgttccgcgtgaacctctctggaggttgatgaatctcgcgagactgaagtatgtgaagtctatgggcaacacgccgggtcatgtgcagcactggtcttcacggacgttcaggagattcgtggggctgtacggagttgtgcgagaatggcgaactcctttgccgtggacgataatcctcctggatgttgagtaacacttcatccatccgcaacgtatccgccgaaaagaatagggaaacttccgggaattccgactcgcgccggccccttgcgcgcgggatgcgccgtccatcattccggcggcgcgtcgatccagtcgtacttgcgggcctcgccgccgattgtgccgcgaggaggaaacttggcgcggtggcggcggaagacatcgtcattgtcagtgggcgacagacgccagcgtgggcacctggccgtggacctggtgcgtcagcgaactgcggcatatggcaagggcggcggccgcccaggatgtggctaccagggggtcgtcctccttggcgtccgtgtaccggttgatccaggcgccgtcgtcgcgctggcgggcgagcagttcagccgcaagggcggcggcccagtcgagcctgccctgtcgcgtctccgcgtcgcggactcccaaggccgcgaaggcgtggctgacggcccaagcccagtagtaataggtcgcgtcgcgaagcacctcgcggtccggctcgaagacgccggggttatgagcggcgtcgaagttccgctccagccacagccgggccgcaaccacccgcgggttttcggcgcccagtccgcagcggaccagcgcccggaccccgtcggccgtcatcgtgccgtaggaatggaagcgaaccagtccgccgcggtccgtccccgcgatcccggccttgttctgcaccgcatcttgcggaatgaagaagaaacccccatcgtcgaagcggctatcggcgccgcgagggtcttccggaaaattctggcaccgccggacaaacgcgagcacctgcctgtaaccgtcgtccgacagcgggaccttcgccgatcgcatcgccgccacgccgaagacggtggccgtcaggttcgactccaccagcaagtcccgcatctgcccctcggcgggctttcgcgggatttccagggagaatccccacccgccgtactgcgggtcgtccggagaccagccgaggtgctcgcttagctgccgcgcccgcaggtacgccagccacgcctgctgggcccgcaggttccgccgcgagcgatccagcaggcacacgacccggctggcggaggcggacgtgtaagcggggaaaagcagttcccgttcggccacgcggattgtcccatcggccccgacgaagccggccaggtactccgtgcccttgcggtagctctcgacggctgccggcccggcctgcggcaggaagaacagcgagctcatcacgtagggcgtgaggctcgggccgtcacggaacatcccgtaggtctccgaccgccacgccccgtccgggccctggcgcccggcgaggtatagccccgccttgtccagcgcgacgtcgatcctggcgataagctccggatcggctcgatcgcacccggccgccagcagcaggccgcacagcaggcccgccggcagtgagtgattccgtcgtaacatcgtggattgctctctagcgtagtgcatcgaatagattgcgaattatcgtgggctccgaattccgaaatccgaagcacgaaattcgaaacaaatccaaatcgccaatttcaaatgttccaaacgccagtgcccggcacactactcgtgaagaacctgagcgcccgttgggggttcttgtttgttttggattttgtattttgaatttgtttcggatttcgtgcttcgagattcggatttatcaggcggcaaaatgtttatcaattctgacacgctctctagcggcgctgaatctttgccgctaccggcaccggcgagcggtccaccatcaacaccagcagcgccgcggaggtgcagaacgtccgcccggtgatgcagtggtgcccggtccagcttccgtcggcgttctggatgcggttcatgttgtcagacatcttccggtcccacttggtccagtcatctccgccctggcacaccagggcctcgccgatggccaggtggctgaggaactcctcgccgccgttggagccgaagccggccaggaagcggtcgtcctcgagcttcttgacgacggcctgcgtcgtggccttaagctgatttcggttatcctcataacgggccaggtccttctcgatcgccgccttttcggcgggctgcgtcgccgccgcggcaagcttggctctcagttccgtctcccgcttggcatcgtaagcggcgttgtcggtctgggcgccgagcgaggaggccgccgcgtaaagtcccacgccggctgagcccttggccgaaaagtcacccgatttggaatcaaatcggtcctgtgcctccttcgcggcccgcgcccggacagtttcgtcgaccttcactccggccatggcagccttgttcattcccttgaccgccatctgttgttcgagcgtctgtgcccagccgccgtcgccccaggtgccgtccgggcgctggttcttctccatctttcgaaccaccttctccagacaggccgtaacttctttgagcaactcctggtcggcggtcttttcctggacctcggcgagcatcgtgcatgtcatgaaggtgtcgatgtatcgcccgagcttcgcctgaatccgcgtgccggcggtcttgtttatcggcagcgaattcggatcagactccgcgacctgtccgcacacgtacttcacgccctcccgcacgttgttggcgtacgtgcccttctcgggcgtgttgcccgctcgcatcagcgaaagcaaggccatgcaggtgtcgccgaggctgggcgtgtctttgagcgatgccccgccgcccatcccggccgactcttctccctggccccaggccccgctttccaactggtgtttggccagccaggccaggccgttatcggcattgacgctgagaggtttgggcttggccgtcgggccagacgccgccttcacggcggaggctggttccgcggccgcagccaagtgcgccagaatcagcgagaccgacagaataacggcagtctttcccattgtccctatgagtttcatagcaagttcctttcaatatggaggtttttcagtttgactggcctcgcgatcaatggcggcaaatgtgaaggtcgcggtcctgtgtctcaatccccggccgtgggaagtcatcggctgcgactgcggcttgatctcgcgaggcggtttggttcatgccaggttcctttcatgcttgcttggatgcgccaagtgcgggaaagttccctgttgtcgatcgccctcgacggtttttcagaccatgccccggtttgtcagacatgaccgggccgcggggaaggggcgcaggtacttcacttctccacgaagccgaacaacttgcgctgctcatcccacatcagcggcaggctgcccgtcagctttcgcggcgacaggccgctcaactcttgcccgcgtaagccagaagcatgttcagcagcggctggagcacgtcttggttcggcagcggcagcttcagataggtctggccggtcgcatcgtcgcggctgagaagaccgcccaacccggctgagatgtcgcgttgcggtccaccgtcggctgcctggcgcagagactgtcccagttggttcagcagggccgccccggccgacaggaggtcgcccactgcctgcggggtgatgatcggcgaacccggcccgtggatgggctgggcctgcttgccggcgccggatgtcgctgaaggcggcgatgggaggtccatcggctcctggccccgcggcgcggctgggacctccgcggcctgtgcggcctggccgttgccgccggctgtatcgtccgagggtatcggactgggaatcgctccggtcgccttgtcgacggtgtccatgaactgcttcagacgcgtgccgcccaggaagacctccttctcgccgccgtccagcaccccggagaacaccgacttcttgaacgacagcagacccaacatgctttcctcgatggtgcccttggcgatgaaatgcaccactcgtaccggccggtgctggccgagccgatgcacccgcccgatccgctgctccaacacggccgggttccacggcaggtccatgtttgccaccacgctggcgtgctggaggttcaggcccacgccgccggcgtcggtggacaggaagaggcggcaggcgggatcctcgcggaaccgcgccaccagatccttgcgcttgggtcccggcacgccgccatggaacatcacgtgtccaagcccgcgtggctccagccggcgaacaatcagttcgtgcatccgcagccactggctgaagattacggccttggcgtctcgatcctccagcacttcctccagcagcgacgccagttcgtcggccttgtacccgtggtcggtctgtttgtccagcaggtaggtgctgttgcagctcatccgcatgttctggagggcgcaggtcaggcgtttctggtcgatctccgacaggtagccgtagcgccgccacttggccacgatacgcgcgacgatctcgcggttgtcctcgtggtgccgcatctgctgatcggtcatcggcacgaagaaccgcttctccagacgctccggcagttccgggagcaccgcatccttggtccggcggacaagcatcggttccagcgtgcgcgaaatctcatcgagcttgcgatagcccaccacccgcccgctctcgtcggtgtgctggtgcgtggccaggaagcggaacatcggaccaagccgatgccggtcaacgaactcgacgatcgaatgcagctcctccaggcgattctccagcggcgtgccggtcaggacgaaggcgtagtccgactgaagctgcttgaccgccttggccgcgcgcgtcttccagttcttgatccgctgggcttcatccaggacgatcaggtcatacctgccccgctggattgcagccaggtcgcggtgtaccacgtcgtaattcacgatcttgtagaacccctcggccgcatacagccgattgcgtgctgccgtcggtccctcgaccacgacggcggatcggccggcgaacttctcaatctcgcgctgccactgatgcttcagcgaggtcgggcagatcaccagtacgcggcggatgtcggcctggcgggtgagtatctcggcggcggcaatggcctcgatggtcttgcccagccccatgtcgtcggcgatgaggcagcgcccggccttggcggcgaacagcgccccctgccgctgataaggatacagcggaacctccagcagcttcttccaggccgggtcgtccgccccgtccgggaatgcccgttcgatccgcttgaccagttcctcgcgatctcgcatctgcgagacaaacgcaagcgcatcgtcatagcagcgaacctcgtgcccatcgcccccgccgtgcccatcgccatcgccgcccgcttggaagcctccgccgccggcctgggccaggaatgtgtggaacagccgcacggcccccggccgcaagacgccattggtatcgaagaacttcgccgcgagactcttgagcgactccggacacttggcgcccggcttgaaaaccacttctcgcttcgccccataccgcagatatacctcgctgaacggttgccgatgcccgccggccagcgccgcctcgcctccgcgccgccgccgcagcctggccagcaggaactcgatatgcttgcacgtgcccagcgtgttggtggcgaaatcggggcacgagcagaagttcacccccaggccttcgccgcgaacggcgacgcggtagatgcctttcgtctgcggattggcgacttcgaattccgagaacacaggccgcccgccgatgtttttgacctcgaattcctgctcagcggcgtattgccggcgcagcgcgacctgccacgcctccagcgacatttcctcgggcttgcgcagccgcggaaccctgcccgtctttgccttcgagaccttcttgactcgcgccatcatgctctccatatgcttctaaatgatcccaaatgctcccaaatgctctccaatcgtccatgccggccgcattgtaacccgcgatgccggccgcttacaaacaaagacccgccggccggatcgccacgcccggtttacacccccgaccgcttcggcaacctcgaccgcccgcccgacctccccgccagcggccaacagggccaccgcgccgacaccggcgacgtccccgccccggccctcgtctgccggtggacgttcatccgggcgtgatgatcccatgcatcagcgcccggaccccaaaatccagaccgtggaatatctcatattgacggtttcgtcacgacagggtacactccacctatcatgccgaacgtcatggggatagatttgggcggcaaggccgtcgggctggctatcgtccagcagccggagaatcgcactctatggtgcggaacaatccatttgtcggacaagatcaaggacctctacgatctccgccgtacgctccgccgagcccgccgcagccgcgtgagataccgtaagcccaaagtcccccagcgcggcggcgggtccgccggccaatcgcaatggagcggctactcttaccgccgcgccaaaggactgaaccaatcccttcggaccaagtgcaagcacgtcgattctgaaaccggcgaggtctgcgacaagaacaccccgaagaacgccaacgtccgccacctgttcctcgacgacatccttagctacgccccatttcaagccgtgcccgatgaccacaagcagtccatccgcgaggtcctcaccagccgcgatggtatagccagccggcgcgagcgtctggcggatctccttgaccggctcaccgtcaaagcctatctcaagaagcagataaaggacatctgtttcaatgacctcgacggccgcgcggagttctgcagcgaccacatcctttgccaccacgcccagactgacgtgcccaaacagtcggcctggctgccgccctcgatccgcctcaagcaggatttcctcctgaagaacatccgcgaactggcccagcttttccacatcgaccgcatcgttctagagcgggccaacttcgacctccagaagatcgccgccggcgtgattgaagacccatcagagtaccagcagggcttccggttcggttcccgcaacacgcggatggccctgatgcaggaatacggcgcgcgttgctgctactgcggccagagcgtcgccggccagaaatggcatgttgaccacatcgacccgcgccgcgctggggaggccaaccggtgggacaacctggccatcgcctgtgaaaagtgcaaccaccaaaagggaggccgcacgccgaaggacgccgggatggccttcgccgtcatctccgagagagtcgccgggcggatgatacgccgctccctggagccccaccccatcgagggaacccggatcaacaagtacatgacccagaccgaccagggcatccgcatgctgaaaaacgccctccgggagatcttgcccggcgcagagatcgaggagactttcggctacgtcaccagcgcctggcgggagttctggggcctcgaaaagggcaaggaaaaacaagagcaccacaacgacgccattgtcatcgccgccgaccgccgcggcggcgcgaagcccatcgtcgaaataattccactggccaatcgccagatcgtgggcggccgccgcctgttcgaccttaaccccgttcagcgcgcgcccgacggccggcattatcagcggacccccgtcgcggccgaggtagggggagtctcaccgagccagctaaaggccgtggtggaccctcgaaagcgggaacttctcacccgcgaattcgcccatcacggcgttaccggcaataagtcgctcccgccggccgcgctggaacgcctgccgttcaccagcgtccggctgcgaaagccggactgcaccgacaccaacgtccgacagatcccatccggccaccgctttaagttgagtaattccggcggcacgcgcgtcaacgaggcggccgtcgtctaccgcacaacggccggcaaggtggcttcctatgtcgtgaagaaccgcttggcctttgggcagacgccccttcctggagatttcgagagggaactttggcgtgcaaaaccgggcgacgtattgtacgatgctggcggaaaccccttcggaagcgttacgaagatcggcagcaacggaaccatgaccttggatacaggaaaatcaagaatggcacatcggtgccggaagggaggaacatagagaaaagccaagaaactaccgcgcgaggcctcccacgcacgggttgaagcgagttttctgcccttgtggggctcctttcctcatcttggcctcgcacgcacgggacgaaggcaacgagacagagacagacagagcgacgccgattttggcctcgcacgcacgggatgaaggccttcgcggcgttcgatgcctggctgaaagagattttggcctcgcacgcacgggatgaaggcaaaatgatgtgccacacgccagatatattatattttggcctcgcacgcacgggatgaagggttccaacgccgacgccatgatcgccgagaagattttggcctcgcaggcacgggatgaaggccaaacaaggctacatacctctcgcccttcttattttggcctcgcaggcacgggatgaaggaacgatcatgccgctgaatgtggcgtttgaacaattttggccttgcaggcacgggatgaagtacgggcctagataacatctacggctggcgtcgcattttggcctcgcaggcacgggatgaaggccggctcccgctcctctccgttgatcgccacattttggcctcgcaggcacgggatgaaggctgacatgttgttgacgatgaggaaagaaagcccaatatcttgtggaatagccggtcagaagtcctgcgcgaggccagccgacagattcatcctgtgttcgcgaggtcaaaagcagcctcagcgaaggccccgttcggggcctgccggggaacccaacgaaaggcgggacccggccaatagctacgtttgcaggaaagctgaagacctatgccgggatatagtgccccatctacccagtcccggcctcttggagtctcgacccggaagatcaacgccccatcggttcggccgggggagagaaaggtcctcgtgaggggacatcgcgtcgggcgaccacgcgacgcccgccgaaaggcggacgagacaagtcgagacatgtgcttcctgtaaacattggctggggatagacgggatttattattggcgccgaaacgacgccgctggtgagggtctgccccgtcgcccgtcggcgcgatcgccacccgattccccgcgccacatccgccgccttggcccggtccagggccgcgtagtcgagcgtgacgtcggcgtcggcatggccgagagacgcgcgtgccgcgtccaggccgaagcgttttctaactcgcgtggcgaatgaattgcggttctggtggcttgttagagagatgatggtggtttttcggaagataacggatgaggaattgaatgccgatgtggtgaagtgcccctacccagtgagctttgatgcttctgaagagaactggggcagcctaacgcacatcagcgagcgccacgtcccgagcggcctataccgcctcagggccaccgggatacgagtgcggaacgaccttacaaatgaacagaagatcgccgtccttgcacacgaaatggcgcatgcattagacctcatacaaccatcaactcttgagcacatacaagacttggcgagaaccgagatggttgcgtatcaggagtgcttgcgttcattactgaatcgcggcctctatcttccgcttctatgggaaatgtttgcgatcgaatgggacgcggaggggcagggcgagtgtatctatagtagaagcgccgcccaggcttgctacggatcccaactttggaatgaatgccgcaacactctcctggaagtaatgaataatgcgatgccacgcgtgcttccggcaagtgtctcatgggaagggcatgaggatgttaagctgattggcacaggggggccaccgttggtggtagcactaaaggacggaagaatcgtggacttccagatagtaaagaattggtcgcccaagagtcgaggcgaagcgtcgtgaatctcccctgttcctcggctcgctctcaccggattcgccgcgcaatcgccgcgccgctcgtcccgtccgcatccgcgatcatcggccccggcccgcgtaggccagaagcaggttcagcagcggctggagcacgtcttggttcggcagcggcagcttcagatagggcggcccggggtagacctgcacgtgggcgccgcgttccgcgtgggcgccgcgttcttgctccaccctttatatcttcctgagtctcagttcaagaacgccgttgttgtaggaggattgtatgccctccttctccacacaggcgggcagcagcacctccgcgtgatacacgtgatcccctttcgttgaaatcgtcaacacatcgccgttgacctggtaggcgatatcgccttgggcaaccccgggcaactcggcgatcacccggatcatgtttccttcgtccaggacatcgaccacaggctccctgtcttcctcgacggccatgccctccttggtcttatggatgttcccgaacggctggaccttgacgccgcggccctcgccgccggccatcgtccggatggaaaagccgaagatgcccttgcccttttcacccagcccagggacgctgaactcgccggtccggctgatcccttcggagtccttcagtttcccggccgcctcgaccagcttctgtatcccctcgaaaattccacccaatccgaacccgacgggggcctgggcttccggcttcttccgcttttggtcttttctggccatgttattctcctcgcaagagttgttcgaagttccgcgtaacagcgcgatcgcgccatccgccatcgcctgccttagtccgttttcccacaatgttgtcaggccgctcggcctcgtgcgccaatacatatcgcggccggcttgactgccgcgcttagcttcttcaaggaagcttccagggccttgccggccgcgacgattatttcggtttcgccgccggccagggcgtctcgcacagccgacacggctgtttcggcggcctcctggagaagctgcacggctggggcctgggcaggggcaatccgggacgcttcgtcaataagctgctctgccgcccggatcaggttttcggcccggatggctgcctcgatctcttcccgtttgcgccggtcggcttccattgccgttcggctgtccgccagcagtcggccaacggtctcctcggagggtcgcacggccgcctcgacgcgaatgcgcctggacgtgtcggtttgcagatcggtggccgacacgtgaatgatcccgttggcgtcgatatcgaaaacaacctcgaccttggcctcgccgcggacctggggcgtgatgccgaccaggtcaaactcacccagggccatgttgtcggcggccatctctcgctctccctgaaggacgtgtacttccatgaccgtctgatcatcccgcgcattggtgaacagccggctgttccttgtcggaacgggggtgtttcgttcgatcactcgcgcgaaaagcccgccctgggtctcgatccccaacgatagcggcgtaacatccaccagggtaaccttccggacctgcccggccaggacgccggcctgaatggccgctcccagcgcaacgaccttgtccgggtcaacgtgcccatatggctctatgcccgtgatctgcctggcaagccttcggaccgcgggcatccgggtcatcccgccgaccagtacgacccggtccaaatccatggggtcaagccccgcatccgccatcgcacgttgcgccggggccaccattttctccgtgaggtcggccgtggcggactcgaaggcatcacgagtcaccgtcaccgcacaccggctgccgtggccgaaggaatgaggcaggaccacggacgcctcgacatcgcttgagagcttgatcttggcttcttccgccagttggcgaaggagccgccggcaggccgggtcgccggtgaggtccacgtgccatcgctcgcaaaaacgctccgccagcatctcggcgaggcgctgatcgtagtcatccccgccgagccgcgtgttgccgttgacggccttgacctcaaagacgccgtcgccgagttccaggatcgacacgtcgaacgtcccgccccccaggtcccagaccaggatggtgtgcgctttttccatgtccagaccgtaggccagcgccgccgccgtcggctcgttcaccaggcgcaccacctccaggccggcgatggatgcggcgtccttggtcgcccggcgctggctgtcgttgaagtatgcgggaactgtgacgacggcgcgctcgacggactcgcccaggtaggtctcggcgtccgctttgagtttttcgaggatcatggccgagatctcgacgggcgtgtatgcccggccgtccaccttcaccatgtagtcggagcccatctgtcgcttgatggaggaaacgaccgtctcgaggccgccgccgcccgcgcaggtgctacccattcgccgcttgacggagaacaccgtcctgagggggttggcgacggcctgcgcccttgcgattcgacccacccatatgcggtcatcacgggcaaaggccaccacggacggcgtcagcgcctcgccctccaggttggggatgatgacgggccggccgtccttcatgtacgccgccagggaattcgtggtgcccaaatcaatgcctacgatcggtcccattccgcacgttccttgccgtaaggccttttgcatttgcaaatgcaaaaggcttgtccgcttcgggctcacctgccgttgccgggccgccctgcctgcgtgtccgttcatgccgttgccgcgattcccgcttgtgagcctggcagcaccccattcggacgcccgtctcgcaggagttgccgctgctcgggcggcacggcccgaatggcctcgtcccaatccgataagatgccgtatttcagcagggtttcggtgccggccaccgccacgctcaacgtcgcgccgatcagcggaatgcccgccagggagatgaccagatccgctcgcaggaacagtcccctgtccaggactctgtccaacaggtccacgatcgttgcgcggcgatacgctttgggaagctcgggttccataatccctatccttgctcggcaacaggatgccttggtgttcacccgccgacgaaactgtacggcggccaaggacccgtgaatcgcacacggatgccagcggtctctttaatcttgtccagtacgcgacccagctccttgccgccatcgggcatcaggcaggagaggttcaggagcatctgcttgccgccatcgtccttcttgagcttctcgacgcgcacatcgtccacgcatcggcggatgcgagcgtagaaatcctgggcgaacaggtcggcttgcgtttccattctggcgcggatgaccttggccagcttctgcccaagaagatgagccatgcctttggatttctcgcgggcctcatcctgtatcttgcgcagctcatcatcgctctgaaccagcgacgccgcgatcgcctggcgatcccagagcacctggactccgtattcggccttgcccgcgagccgctcgagcaactgggtgaaccgctctcgcttctcgtccagccaacccttgagcgccacgatggccccgccgtcaagtccgccgcgcacgatgatgtcgaacgccatcggcaagacggtcccgaaagccttcgtcgccgcgcgtacgacgctctgatgggccaacacccagccctccaggacctgaggatcctgggactggtacggctgggccgggcagttgtgaacgatggcgcggatgtccccgctggccacggtataaaccatctgcccatccagcccgatcgggccgagcaggcaactgccgtcgccgcgagccacgcagtagacgtacaatgcgtcctgcgcgacggccggcggattgccttggtctttatttgcaaagatcatcgtcccgcccccacaggcttctggcccccggcggcgaccaattcgtcgcgccacgtgctcgggtcgatcgctcgctggaccacgtcattgacgatgtcgtccaggccgtcacgaaccgactggacggcctgttcgagtccctgctcgcgcttgatgccctcgatggcaagatccaggtccgcaagggcaaccccgagacgctcgacttcctcgtcgctgagcgagcccgactcgattcgtcgcgtggcctggttctggagggcgtcccggaggatttccaccaccgccaacaccaggcccagaacgccgtttttcaagctgtcttggtctatgttgatcattgcttgcccgccttccttatttggatgttcaggatgccgttagacaaggacatctccggcttgccgaccacctcgcaaggcagctcgatccgttggaggcccccgcgatgggcggcctcgacggatatcaacagcaccgtgccctccagagaaacggtgatgtcctccgccttcaagcccggggcttccgccagaacgacgatcttgctgccttcgtcgaagacatcgacgtgaagctgcgcgggcgtttcagggctgatatggactttttgcaaaaagggcggctgaggctgtcggtacttgccgcggcggacaccttttccagaaggctttttacaaaaggcttcgcaggcccctgtcgaagcggaccgtccaggccgtccgcgccgcacggatgggggtatgcccatctggcggcgaccgaggttgccggcgattcccaaggaggcccggttaagcggttgctccttgaacttgcgtttgacttcctcgtcgatagcggcaaggcgctgctgaaactcaggcatccgcgatgcggtctcgatcaaccttcccagtccggggaccagttttcccagagcggttacaacgccctcggccaacccctctgccttgccccggggttccttggcgtcttcctggagcttgcggaggctttcctgcaattgcctcacctgctcacgcagttcctctgtgttttctttgcctggccttgtcttcgacatcgtccactacccttcatcgtcggcccgcgccggtctgcgccgcacgtgcttccggcggcctctacgaggcgaccatccgcttcttgatcctggcgggcatccagtcgcaccagggacagccccgcgacaggagttccgcctgggcggaacgtttgccgcattgcgggcagtcatccttgattaccacagcctgtttccaggcctcggtgtcgaggttcgatcctgccggcagcgcaaggccgtacctggccgcggtctccagggatgcaagcaccgcccggatcctgatactgagcagctcgacgccggccagggacaccgcgatgtcggcgttgatcaccaggcccttgtcgaggacccggtcgattacgtcggcgagcgtgtcggcccggacggaatgctccatgctttgcttggcggggctcatcctaagcctccccatccgcaccggccgtcatcgccaccacttccgcccgccggcgcatcccgacgcgcgtgaagtcctgaacgtagccctcgtcatccacggtcagttcgtaagtggccaggatgtcctgggagtcgggtatggagttcttctccaccacctccacctgcacgcaccagccggatttgcctttgccgaccgagaccgtgctgcccaccttcaggccggtgagatcgtgaagctgttcccgcgcccttgtgaccaagtccagcaatgccattgtcatgtgtctgctcctttcgatcagaagcgagtgttttttacaaacaagccttctgcctggattccttgtatttgtggatttcgttcagccggcgcatcaacgcgttttcctgtttgatgtactcatcctcgccgatttgctccagttccagccgggtttgaaggtccagcagccgctcacggatgacggattcgtccgtgacttccgccagggcctgatcgtacagggtccgcccgatccaggtaacgaacttgcacggggccaggaggatgtcgtcgaggatgaatgccatgttcagtcgtcccaggtaatgacaagctccaggaaattgcacggcggcagggggcctacgcagcgcaacttcacttggcccgcctgctgggcctcgaaggcggacaggacggcctcgatgtcgttctggcgcgacttgtccaccaggagcgccaggttcgcgaacatcggatcgccgaaggtcttgttcctccgggaatctttcgccaggggcgtcaggcgccgcatcagggcggcctccgtgccgcattttccgtcctccagggcttgcttgaccctctcgcccagcttgatccggccggtcacgttcgtcggggccttgcgcgcggacccccggtcgccggcgggcagcagcttcttacgcagcgattggatctccgggctgctctccacgatgtcccggaataccgcctccatgtttgtccacaggcccttgacgccgacctccacgagggggcgcatggtcgtcaacaggccgagaatctcgtcccttctggcaacaagcacgcggtcgatgatccgctgcgcggccgtgctcttgcccttgtcttcggcgatcgtgttgaaccggactggcaggacagtgtggccgcgctgcatgaccgcttccatcacccgttggtgcgccagggcgttttcgcgcgagatttccagtttctcccgcgccgtggcgctgacgacggcggcaatgccgttatggggcacggcgaacacttccgattgtccgtcgatgcccatggggccaaaactgccgggcacgccgctatcgatgacgcaatagatgtagcgccgcggcgcccgcggcttgtccgtggtgaaacaagccggttcggcttcaatgcgcggtgtgtcggttagtgtggccgtggtcatcttcgttttcttcccattacgccgccgcggccccgacgcaatcgccgcgccgagacggatctcgccccgtggacactctcggaccggccccttttgccaaaaggttgtcgagggatctgaccgtaacgatcacgggactcacttgggcggcgttgaacgtgtgtttgaaattcaatgcgtattcttccagaagctcgtgtgcggccgagatgtcctgaagtcgttccgcggccccggcctgcgtgtttctgtcggggtgcagctcctggagcagccgccggtatgcgcctttgatctcggccagactggcggattcgcccagtccaagcagccgcctggcggcatccagccggcttgcctggatggtcttgacttccgccgtcgcgaaactgtaggggggaagcggtccgacacggcgaaacttgagccggtcatcgtaagagcggttcaactgctccaggacccggtcaaactcggcttgctccgcgcgatcgatcagcacggcggcgttgaggaccgccgagtcatccctcgtggggttgacgacgatgttccgccacttggtccgcagcgagacgaccagaccgtcggcggcggccttgttcttccggtcgagcagctctttcaccaactgcccgaggcggatgcgctgctccacggtagcttcggcgtggttgtcgatccgggccttcatcgagatgacggcctcgtcccgggcgatctcggcaaggatggacttcaggtctgcccaggagacagcgacatcgaactcgaccttcccggcatagctttccagggcgccggcgaactgcttcccgccgcagcggagtatcctcacgacctcggcatcgttccgggctttttcgcaaaacgtcccgaacttcaccgggacgaccgtgcagtcgagcatgacccgctcgaggacacgctgatgctgagcgaggtactgaagcgtcttctcgggcgggatctcgaaaaaagcaacgggggcggtcgtgctgatcacaatgccgatgccgccgtccgagacggtgcggacctcctcgccgtccaggccgatgggcccgaagtccttcgcctgatcggctggaacgacgccgtagagatagctgcaattcgatgtcatggtcggctccatattccgtcgtcttttcaggccgcgaatttcctgatgagcgtctcgacgtttaccctgatggaagaatctt

SEQ ID NO: 88 - DNA, 16158 bp, Artificial Sequence
  Synthetic
  misc_feature (1)..(9498): n is a, c, g, or t
nnnnnnnnnnnnnnnnnnnnnnnnnnnnnnnnnnnnnnnnnnnnnnnnnnnnnnnnnnnnnnnnnnnnnnnnnnnnnnnnnnnnnnnnnnnnnnnnnnnnnnnnnnnnnnnnnnnnnnnnnnnnnnnnnnnnnnnnnnnnnnnnnnnnnnnnnnnnnnnnnnnnnnnnnnnnnnnnnnnnnnnnnnnnnnnnnnnnnnnnnnnnnnnnnnnnnnnnnnnnnnnnnnnnnnnnnnnnnnnnnnnnnnnnnnnnnnnnnnnnnnnnnnnnnnnnnnnnnnnnnnnnnnnnnnnnnnnnnnnnnnnnnnnnnnnnnnnnnnnnnnnnnnnnnnnnnnnnnnnnnnnnnnnnnnnnnnnnnnnnnnnnnnnnnnnnnnnnnnnnnnnnnnnnnnnnnnnnnnnnnnnnnnnnnnnnnnnnnnnnnnnnnnnnnnnnnnnnnnnnnnnnnnnnnnnnnnnnnnnnnnnnnnnnnnnnnnnnnnnnnnnnnnnnnnnnnnnnnnnnnnnnnnnnnnnnnnnnnnnnnnnnnnnnnnnnnnnnnnnnnnnnnnnnnnnnnnnnnnnnnnnnnnnnnnnnnnnnnnnnnnnnnnnnnnnnnnnnnnnnnnnnnnnnnnnnnnnnnnnnnnnnnnnnnnnnnnnnnnnnnnnnnnnnnnnnnnnnnnnnnnnnnnnnnnnnnnnnnnnnnnnnnnnnnnnnnnnnnnnnnnnnnnnnnnnnnnnnnnnnnnnnnnnnnnnnnnnnnnnnnnnnnnnnnnnnnnnnnnnnnnnnnnnnnnnnnnnnnnnnnnnnnnnnnnnnnnnnnnnnnnnnnnnnnnnnnnnnnnnnnnnnnnnnnnnnnnnnnnnnnnnnnnnnnnnnnnnnnnnnnnnnnnnnnnnnnnnnnnnnnnnnnnnnnnnnnnnnnnnnnnnnnnnnnnnnnnnnnnnnnnnnnnnnnnnnnnnnnnnnnnnnnnnnnnnnnnnnnnnnnnnnnnnnnnnnnnnnnnnnnnnnnnnnnnnnnnnnnnnnnnnnnnnnnnnnnnnnnnnnnnnnnnnnnnnnnnnnnnnnnnnnnnnnnnnnnnnnnnnnnnnnnnnnnnnnnnnnnnnnnnnnnnnnnnnnnnnnnnnnnnnnnnnnnnnnnnnnnnnnnnnnnnnnnnnnnnnnnnnnnnnnnnnnnnnnnnnnnnnnnnnnnnnnnnnnnnnnnnnnnnnnnnnnnnnnnnnnnnnnnnnnnnnnnnnnnnnnnnnnnnnnnnnnnnnnnnnnnnnnnnnnnnnnnnnnnnnnnnnnnnnnnnnnnnnnnnnnnnnnnnnnnnnnnnnnnnnnnnnnnnnnnnnnnnnnnnnnnnnnnnnnnnnnnnnnnnnnnnnnnnnnnnnnnnnnnnnnnnnnnnnnnnnnnnnnnnnnnnnnnnnnnnnnnnnnnnnnnnnnnnnnnnnnnnnnnnnnnnnnnnnnnnnnnnnnnnnnnnnnnnnnnnnnnnnnnnnnnnnnnnnnnnnnnnnnnnnnnnnnnnnnnnnnnnnnnnnnnnnnnnnnnnnnnnnnnnnnnnnnnnnnnnnnnnnnnnnnnnnnnnnnnnnnnnnnnnnnnnnnnnnnnnnnnnnnnnnnnnnnnnnnnnnnnnnnnnnnnnnnnnnnnnnnnnnnnnnnnnnnnnnnnnnnnnnnnnnnnnnnnnnnnnnnnnnnnnnnnnnnnnnnnnnnnnnnnnnnnnnnnnnnnnnnnnnnnnnnnnnnnnnnnnnnnnnnnnnnnnnnnnnnnnnnnnnnnnnnnnnnnnnnnnnnnnnnnnnnnnnnnnnnnnnnnnnnnnnnnnnnnnnnnnnnnnnnnnnnnnnnnnnnnnnnnnnnnnnnnnnnnnnnnnnnnnnnnnnnnnnnnnnnnnnnnnnnnnnnnnnnnnnnnnnnnnnnnnnnnnnnnnnnnnnnnnnnnnnnnnnnnnnnnnnnnnnnnnnnnnnnnnnnnnnnnnnnnnnnnnnnnnnnnnnnnnnnnnnnnnnnnnnnnnnnnnnnnnnnnnnnnnnnnnnnnnnnnnnnnnnnnnnnnnnnnnnnnnnnnnnnnnnnnnnnnnnnnnnnnnnnnnnnnnnnnnnnnnnnnnnnnnnnnnnnnnnnnnnnnnnnnnnnnnnnnnnnnnnnnnnnnnnnnnnnnnnnnnnnnnnnnnnnnnnnnnnnnnnnnnnnnnnnnnnnnnnnnnnnnnnnnnnnnnnnnnnnnnnnnnnnnnnnnnnnnnnnnnnnnnnnnnnnnnnnnnnnnnnnnnnnnnnnnnnnnnnnnnnnnnnnnnnnnnnnnnnnnnnnnnnnnnnnnnnnnnnnnnnnnnnnnnnnnnnnnnnnnnnnnnnnnnnnnnnnnnnnnnnnnnnnnnnnnnnnnnnnnnnnnnnnnnnnnnnnnnnnnnnnnnnnnnnnnnnnnnnnnnnnnnnnnnnnnnnnnnnnnnnnnnnnnnnnnnnnnnnnnnnnnnnnnnnnnnnnnnnnnnnnnnnnnnnnnnnnnnnnnnnnnnnnnnnnnnnnnnnnnnnnnnnnnnnnnnnnnnnnnnnnnnnnnnnnnnnnnnnnnnnnnnnnnnnnnnnnnnnnnnnnnnnnnnnnnnnnnnnnnnnnnnnnnnnnnnnnnnnnnnnnnnnnnnnnnnnnnnnnnnnnnnnnnnnnnnnnnnnnnnnnnnnnnnnnnnnnnnnnnnnnnnnnnnnnnnnnnnnnnnnnnnnnnnnnnnnnnnnnnnnnnnnnnnnnnnnnnnnnnnnnnnnnnnnnnnnnnnnnnnnnnnnnnnnnnnnnnnnnnnnnnnnnnnnnnnnnnnnnnnnnnnnnnnnnnnnnnnnnnnnnnnnnnnnnnnnnnnnnnnnnnnnnnnnnnnnnnnnnnnnnnnnnnnnnnnnnnnnnnnnnnnnnnnnnnnnnnnnnnnnnnnnnnnnnnnnnnnnnnnnnnnnnnnnnnnnnnnnnnnnnnnnnnnnnnnnnnnnnnnnnnnnnnnnnnnnnnnnnnnnnnnnnnnnnnnnnnnnnnnnnnnnnnnnnnnnnnnnnnnnnnnnnnnnnnnnnnnnnnnnnnnnnnnnnnnnnnnnnnnnnnnnnnnnnnnnnnnnnnnnnnnnnnnnnnnnnnnnnnnnnnnnnnnnnnnnnnnnnnnnnnnnnnnnnnnnnnnnnnnnnnnnnnnnnnnnnnnnnnnnnnnnnnnnnnnnnnnnnnnnnnnnnnnnnnnnnnnnnnnnnnnnnnnnnnnnnnnnnnnnnnnnnnnnnnnnnnnnnnnnnnnnnnnnnnnnnnnnnnnnnnnnnnnnnnnnnnnnnnnnnnnnnnnnnnnnnnnnnnnnnnnnnnnnnnnnnnnnnnnnnnnnnnnnnnnnnnnnnnnnnnnnnnnnnnnnnnnnnnnnnnnnnnnnnnnnnnnnnnnnnnnnnnnnnnnnnnnnnnnnnnnnnnnnnnnnnnnnnnnnnnnnnnnnnnnnnnnnnnnnnnnnnnnnnnnnnnnnnnnnnnnnnnnnnnnnnnnnnnnnnnnnnnnnnnnnnnnnnnnnnnnnnnnnnnnnnnnnnnnnnnnnnnnnnnnnnnnnnnnnnnnnnnnnnnnnnnnnnnnnnnnnnnnnnnnnnnnnnnnnnnnnnnnnnnnnnnnnnnnnnnnnnnnnnnnnnnnnnnnnnnnnnnnnnnnnnnnnnnnnnnnnnnnnnnnnnnnnnnnnnnnnnnnnnnnnnnnnnnnnnnnnnnnnnnnnnnnnnnnnnnnnnnnnnnnnnnnnnnnnnnnnnnnnnnnnnnnnnnnnnnnnnnnnnnnnnnnnnnnnnnnnnnnnnnnnnnnnnnnnnnnnnnnnnnnnnnnnnnnnnnnnnnnnnnnnnnnnnnnnnnnnnnnnnnnnnnnnnnnnnnnnnnnnnnnnnnnnnnnnnnnnnnnnnnnnnnnnnnnnnnnnnnnnnnnnnnnnnnnnnnnnnnnnnnnnnnnnnnnnnnnnnnnnnnnnnnnnnnnnnnnnnnnnnnnnnnnnnnnnnnnnnnnnnnnnnnnnnnnnnnnnnnnnnnnnnnnnnnnnnnnnnnnnnnnnnnnnnnnnnnnnnnnnnnnnnnnnnnnnnnnnnnnnnnnnnnnnnnnnnnnnnnnnnnnnnnnnnnnnnnnnnnnnnnnnnnnnnnnnnnnnnnnnnnnnnnnnnnnnnnnnnnnnnnnnnnnnnnnnnnnnnnnnnnnnnnnnnnnnnnnnnnnnnnnnnnnnnnnnnnnnnnnnnnnnnnnnnnnnnnnnnnnnnnnnnnnnnnnnnnnnnnnnnnnnnnnnnnnnnnnnnnnnnnnnnnnnnnnnnnnnnnnnnnnnnnnnnnnnnnnnnnnnnnnnnnnnnnnnnnnnnnnnnnnnnnnnnnnnnnnnnnnnnnnnnnnnnnnnnnnnnnnnnnnnnnnnnnnnnnnnnnnnnnnnnnnnnnnnnnnnnnnnnnnnnnnnnnnnnnnnnnnnnnnnnnnnnnnnnnnnnnnnnnnnnnnnnnnnnnnnnnnnnnnnnnnnnnnnnnnnnnnnnnnnnnnnnnnnnnnnnnnnnnnnnnnnnnnnnnnnnnnnnnnnnnnnnnnnnnnnnnnnnnnnnnnnnnnnnnnnnnnnnnnnnnnnnnnnnnnnnnnnnnnnnnnnnnnnnnnnnnnnnnnnnnnnnnnnnnnnnnnnnnnnnnnnnnnnnnnnnnnnnnnnnnnnnnnnnnnnnnnnnnnnnnnnnnnnnnnnnnnnnnnnnnnnnnnnnnnnnnnnnnnnnnnnnnnnnnnnnnnnnnnnnnnnnnnnnnnnnnnnnnnnnnnnnnnnnnnnnnnnnnnnnnnnnnnnnnnnnnnnnnnnnnnnnnnnnnnnnnnnnnnnnnnnnnnnnnnnnnnnnnnnnnnnnnnnnnnnnnnnnnnnnnnnnnnnnnnnnnnnnnnnnnnnnnnnnnnnnnnnnnnnnnnnnnnnnnnnnnnnnnnnnnnnnnnnnnnnnnnnnnnnnnnnnnnnnnnnnnnnnnnnnnnnnnnnnnnnnnnnnnnnnnnnnnnnnnnnnnnnnnnnnnnnnnnnnnnnnnnnnnnnnnnnnnnnnnnnnnnnnnnnnnnnnnnnnnnnnnnnnnnnnnnnnnnnnnnnnnnnnnnnnnnnnnnnnnnnnnnnnnnnnnnnnnnnnnnnnnnnnnnnnnnnnnnnnnnnnnnnnnnnnnnnnnnnnnnnnnnnnnnnnnnnnnnnnnnnnnnnnnnnnnnnnnnnnnnnnnnnnnnnnnnnnnnnnnnnnnnnnnnnnnnnnnnnnnnnnnnnnnnnnnnnnnnnnnnnnnnnnnnnnnnnnnnnnnnnnnnnnnnnnnnnnnnnnnnnnnnnnnnnnnnnnnnnnnnnnnnnnnnnnnnnnnnnnnnnnnnnnnnnnnnnnnnnnnnnnnnnnnnnnnnnnnnnnnnnnnnnnnnnnnnnnnnnnnnnnnnnnnnnnnnnnnnnnnnnnnnnnnnnnnnnnnnnnnnnnnnnnnnnnnnnnnnnnnnnnnnnnnnnnnnnnnnnnnnnnnnnnnnnnnnnnnnnnnnnnnnnnnnnnnnnnnnnnnnnnnnnnnnnnnnnnnnnnnnnnnnnnnnnnnnnnnnnnnnnnnnnnnnnnnnnnnnnnnnnnnnnnnnnnnnnnnnnnnnnnnnnnnnnnnnnnnnnnnnnnnnnnnnnnnnnnnnnnnnnnnnnnnnnnnnnnnnnnnnnnnnnnnnnnnnnnnnnnnnnnnnnnnnnnnnnnnnnnnnnnnnnnnnnnnnnnnnnnnnnnnnnnnnnnnnnnnnnnnnnnnnnnnnnnnnnnnnnnnnnnnnnnnnnnnnnnnnnnnnnnnnnnnnnnnnnnnnnnnnnnnnnnnnnnnnnnnnnnnnnnnnnnnnnnnnnnnnnnnnnnnnnnnnnnnnnnnnnnnnnnnnnnnnnnnnnnnnnnnnnnnnnnnnnnnnnnnnnnnnnnnnnnnnnnnnnnnnnnnnnnnnnnnnnnnnnnnnnnnnnnnnnnnnnnnnnnnnnnnnnnnnnnnnnnnnnnnnnnnnnnnnnnnnnnnnnnnnnnnnnnnnnnnnnnnnnnnnnnnnnnnnnnnnnnnnnnnnnnnnnnnnnnnnnnnnnnnnnnnnnnnnnnnnnnnnnnnnnnnnnnnnnnnnnnnnnnnnnnnnnnnnnnnnnnnnnnnnnnnnnnnnnnnnnnnnnnnnnnnnnnnnnnnnnnnnnnnnnnnnnnnnnnnnnnnnnnnnnnnnnnnnnnnnnnnnnnnnnnnnnnnnnnnnnnnnnnnnnnnnnnnnnnnnnnnnnnnnnnnnnnnnnnnnnnnnnnnnnnnnnnnnnnnnnnnnnnnnnnnnnnnnnnnnnnnnnnnnnnnnnnnnnnnnnnnnnnnnnnnnnnnnnnnnnnnnnnnnnnnnnnnnnnnnnnnnnnnnnnnnnnnnnnnnnnnnnnnnnnnnnnnnnnnnnnnnnnnnnnnnnnnnnnnnnnnnnnnnnnnnnnnnnnnnnnnnnnnnnnnnnnnnnnnnnnnnnnnnnnnnnnnnnnnnnnnnnnnnnnnnnnnnnnnnnnnnnnnnnnnnnnnnnnnnnnnnnnnnnnnnnnnnnnnnnnnnnnnnnnnnnnnnnnnnnnnnnnnnnnnnnnnnnnnnnnnnnnnnnnnnnnnnnnnnnnnnnnnnnnnnnnnnnnnnnnnnnnnnnnnnnnnnnnnnnnnnnnnnnnnnnnnnnnnnnnnnnnnnnnnnnnnnnnnnnnnnnnnnnnnnnnnnnnnnnnnnnnnnnnnnnnnnnnnnnnnnnnnnnnnnnnnnnnnnnnnnnnnnnnnnnnnnnnnnnnnnnnnnnnnnnnnnnnnnnnnnnnnnnnnnnnnnnnnnnnnnnnnnnnnnnnnnnnnnnnnnnnnnnnnnnnnnnnnnnnnnnnnnnnnnnnnnnnnnnnnnnnnnnnnnnnnnnnnnnnnnnnnnnnnnnnnnnnnnnnnnnnnnnnnnnnnnnnnnnnnnnnnnnnnnnnnnnnnnnnnnnnnnnnnnnnnnnnnnnnnnnnnnnnnnnnnnnnnnnnnnnnnnnnnnnnnnnnnnnnnnnnnnnnnnnnnnnnnnnnnnnnnnnnnnnnnnnnnnnnnnnnnnnnnnnnnnnnnnnnnnnnnnnnnnnnnnnnnnnnnnnnnnnnnnnnnnnnnnnnnnnnnnnnnnnnnnnnnnnnnnnnnnnnnnnnnnnnnnnnnnnnnnnnnnnnnnnnnnnnnnnnnnnnnnnnnnnnnnnnnnnnnnnnnnnnnnnnnnnnnnnnnnnnnnnnnnnnnnnnnnnnnnnnnnnnnnnnnnnnnnnnnnnnnnnnnnnnnnnnnnnnnnnnnnnnnnnnnnnnnnnnnnnnnnnnnnnnnnnnnnnnnnnnnnnnnnnnnnnnnnnnnnnnnnnnnnnnnnnnnnnnnnnnnnnnnnnnnnnnnnnnnnnnnnnnnnnnnnnnnnnnnnnnnnnnnnnnnnnnnnnnnnnnnnnnnnnnnnnnnnnnnnnnnnnnnnnnnnnnnnnnnnnnnnnnnnnnnnnnnnnnnnnnnnnnnnnnnnnnnnnnnnnnnnnnnnnnnnnnnnnnnnnnnnnnnnnnnnnnnnnnnnnnnnnnnnnnnnnnnnnnnnnnnnnnnnnnnnnnnnnnnnnnnnnnnnnnnnnnnnnnnnnnnnnnnnnnnnnnnnnnnnnnnnnnnnnnnnnnnnnnnnnnnnnnnnnnnnnnnnnnnnnnnnnnnnnnnnnnnnnnnnnnnnnnnnnnnnnnnnnnnnnnnnnnnnnnnnnnnnnnnnnnnnnnnnnnnnnnnnnnnnnnnnnnnnnnnnnnnnnnnnnnnnnnnnnnnnnnnnnnnnnnnnnnnnnnnnnnnnnnnnnnnnnnnnnnnnnnnnnnnnnnnnnnnnnnnnnnnnnnnnnnnnnnnnnnnnnnnnnnnnnnnnnnnnnnnnnnnnnnnnnnnnnnnnnnnnnnnnnnnnnnnnnnnnnnnnnnnnnnnnnnnnnnnnnnnnnnnnnnnnnnnnnnnnnnnnnnnnnnnnnnnnnnnnnnnnnnnnnnnnnnnnnnnnnnnnnnnnnnnnnnnnnnnnnnnnnnnnnnnnnnnnnnnnnnnnnnnnnnnnnnnnnnnnnnnnnnnnnnnnnnnnnnnnnnnnnnnnnnnnnnnnnnnnnnnnnnnnnnnnnnnnnnnnnnnnnnnnnnnnnnnnnnnnnnnnnnnnnnnnnnnnnnnnnnnnnnnnnnnnnnnnnnnnnnnnnnnnnnnnnnnnnnnnnnnnnnnnnnnnnnnnnnnnnnnnnnnnnnnnnnnnnnnnnnnnnnnnnnnnnnnnnnnnnnnnnnnnnnnnnnnnnnnnnnnnnnnnnnnnnnnnnnnnnnnnnnnnnnnnnnnnnnnnnnnnnnnnnnnnnnnnnnnnnnnnnnnnnnnnnnnnnnnnnnnnnnnnnnnnnnnnnnnnnnnnnnnnnnnnnnnnnnnnnnnnnnnnnnnnnnnnnnnnnnnnnnnnnnnnnnnnnnnnnnnnnnnnnnnnnnnnnnnnnnnnnnnnnnnnnnnnnnnnnnnnnnnnnnnnnnnnnnnnnnnnnnnnnnnnnnnnnnnnnnnnnnnnnnnnnnnnnnnnnnnnnnnnnnnnnnnnnnnnnnnnnnnnnnnnnnnnnnnnnnnnnnnnnnnnnnnnnnnnnnnnnnnnnnnnnnnnnnnnnnnnnnnnnnnnnnnnnnnnnnnnnnnnnnnnnnnnnnnnnnnnnnnnnnnnnnnnnnnnnnnnnnnnnnnnnnnnnnnnnnnnnnnnnnnnnnnnnnnnnnnnnnnnnnnnnnnnnnnnnnnnnnnnnnnnnnnnnnnnnnnnnnnnnnnnnnnnnnnnnnnnnnnnnnnnnnnnnnnnnnnnnnnnnnnnnnnnnnnnnnnnnnnnnnnnnnnnnnnnnnnnnnnnnnnnnnnnnnnnnnnnnnnnnnnnnnnnnnnnnnnnnnnnnnnnnnnnnnnnnnnnnnnnnnnnnnnnnnnnnnnnnnnnnnnnnnnnnnnnnnnnnnnnnnnnnnnnnnnnnnnnnnnnnnnnnnnnnnnnnnnnnnnnnnnnnnnnnnnnnnnnnnnnnnnnnnnnnnnnnnnnnnnnnnnnnnnnnnnnnnnnnnnnnnnnnnnnnnnnnnnnnnnnnnnnnnnnnnnnnnnnnnnnnnnnnnnnnnnnnnnnnnnnnnnnnnnnnnnnnnnnnnnnnnnnnnnnnnnnnnnnnnnnnnnnnnnnnnnnnnnnnnnnnnnnnnnnnnnnnnnnnnnnnnnnnnnnnnnnnnnnnnnnnnnnnnnnnnnnnnnnnnnnnnnnnnnnnnnnnnnnnnnnnnnnnnnnnnnnnnnnnnnnnnnnnnnnnnnnnnnnnnnnnnnnnnnnnnnnnnnnnnnnnnnnnnnnnnnnnnnnnnnnnnnnnnnnnnnnnnnnnnnnnnnnnnnnnnnnnnnnnnnnnnnnnnnnnnnnnnnnnnnnnnnnnnnnnnnnnnnnnnnnnnnnnnnnnnnnnnnnnnnnnnnnnnnnnnnnnnnnnnnnnnnnnnnnnnnnnnnnnnnnnnnnnnnnnnnnnnnnnnnnnnnnnnnnnnnnnnnnnnnnnnnnnnnnnnnnnnnnnnnnnnnnnnnnnnnnnnnnnnnnnnnnnnnnnnnnnnnnnnnnnnnnnnnnnnnnnnnnnnnnnnnnnnnnnnnnnnnnnnnnnnnnnnnngcggtggccgtccaggtgcgtcgggcgcccgtgccgctccggcgcccagcggacctgggcgtcgcactcggccccgacggccgcggccgccgccggcatgttcgccgtgatggtcgtcgacgtcgcgatcccctcgcggtgggcgcgccggacgccctccgtgacgccgccggagaacccgaagtcgtcggcgttgacgatggcccgcttggcgttgcgcgccgcactcatcccggcgcggcctatcgtgcgccgccgcgcggggcgacaatccccattcctatattggcgattcgacggcctcaagcgccgggacgtgtggtcattgtgtcgacatttaaaccgactgacacaatcgcttcgcgccattaccatctatattacatagctttagatatcctatcactcaagcgggattccggagggcagtacaatcagcccttacatccgtaatccccagtgcctcatcgtagcttctgccccccgaggcggccatgggtcttgattgctatctgttaccagtccacgtccggcgtttcccagggggtcggaatcaatataagacactacattagaatctcttatccccgtccccccttcggacagtccgcctccccgccgccgcatttgcccgcgagcggccttgcggaatcccctcggccccgctatgatacatggcagccgcgatgttccgatcgcgtggcacttcggcgcatcgccggaacgggaagacgatcatgccgcccggattttccttgtcgacgcccgggcgcggccgtatgctcccaactcatggtggccaacgccctggggatagacttgggcggcaaggcagtggggcttgctgtgctggagcgaccgggcaaccgcgtcctgtggtgcggaacggtccacctctccgacaagatcaaggatctctacgaccagcggcggacgctgcgccgggcgcgccggggccgcgggcgctaccgcaagccgaaggtcccccagcgaggcggaggatcggcgggccagacccagtggagcggcttccgctaccggcgcgccaagggcctcaaccagtccctccgaaccaagtgcaagtacgtcgatcccgacacgggcgaggtctgcggaaggaacacggcgaagcgctccaatgtccggcatcttttcctggaggacatcctcggcttcgcgccgttctcggacgtcccggccgactacaagcaggccatccgcgacgtgctggcgtcgagggaaggcatcgcaacgcggaagcagcgcctcgcggccgtcctgagccggatcgacgtggaccggtacctcaagaagcagatcacggagatctgcttcgacgagcgcgggggacgcgcggagttctgccgggaccacatccccgcccgccacacgcagaccgccatccccacgcaggccgtctggctccccccgtccattcggatcaagcaggacttcctcctcaagcatgtccgccaacttgccgccagcgtccgcatcgaccgcatcgtcatcgagcgcgccaacttcgacctccagaagatcgcgaagggagtgatcgacgatcccgcggagtaccagcagggcgcccggtacggcttccgcaacacgcggatggccctcatgcaggagtacggcgcccgttgctgctactgcggcaagagcgtcgtcggcgagaagtggcacgtggaccacatcgacccgcggcgtacgggcgagacgaaccgctggaacaacctcgccatcgcctgcgagaagtgcaaccacaagaaaggcgggcggacgcccctcgatgcgggcatggccttcgccgtggtcggcgagaccgtcgccggccggcgcatccggcgccggctggagcccaagccgctcgccggaagccgtatcaacaagtacatgacgcagaccgaccagggcatccggatcctcaagcgctccctcgccgagatcgtccccggcgcgcccatcgaggagacctacggctacgtgacgagcgcctggcgggacctgtggggcctggagaagggcagggagaagcaggagcaccacaacgacgcgatcgtcatcgcctccctgcgcgaagttgccgccgtccccatcgtcgaggtctcaccgcaggcgatccggcagaccgtcggcggcaagcgcctcttcgacctcaaccccgtccagcgcgcgcgcgacgcgaagtactaccagcgcggcccggtggtcgcggaggtcggcgggatcgcgccggcccaactgcctgcggtcgtggacgagcgcaaacgcaagctgctcgcccgcgagttcgctcgctacggcgtcacgggcaggaagccgctgccgccgccggcgctggatcgcctccccttcaagagcgtccgcctccgcaagcgcgactgcacggatgccaacgtgcgtcggatggcgacgggccaccgcttcaagctcagcaaccccggcggcacgcgcgtcaaccaggccgtcgtcgtgtatctcacgtccgctggcaagcgggcgtcctacgccgtcaagaacacccgggccttcggcccgacggcgccgcccgacgacctcgaccgcgagctgtggcgcttccgcccgggagatgcggtcgccgatcgggacggcggcgcgatcgggcgcgtcgtcaagctcggcagcgacgggacgctgacactcgattccggcaagacacgaaaggcacacacgtgcagcaagggaggtggtcgaatgaccacgagctagacggcgcgaggcctcgcctgcgtgggacgatcattccgccgtcttctcacgagggcggtagggtaattctggcctcgcgggcgtgggacgatgtggtggcgttgaaggtgaacccacccaacgcagattctggcctcgcgggcgtgggacgatgtcacgaacgaccggatcctcgaggccgtacggcattctcgcctcgcgggcgtgggacgatgggtttgatgcggagaccgtcgcggctcttgtaaattctggcctcgcgggcgtgggacgatggccagcaagtttgatgccgcgcgtcacgggactattctggcctcgcgggcgtgggacgatgggaaagttgactaactgaaagagtgtgggagacattctggcctcgcgggcgtgggacgatgcgcttcagtttctcgaggaacagggcgtcaaccattctggcctctcgcgggcgtgggacgatgtggtagccaccgtaccagaagttgaacgggtacattctgggctcgcgggcgtgggacgatggaacgccaagggcatcgccgccatccaggagaagattctgggctcgcgggcgtgggacgatgactgacatgttgtgtgcgaggaagccgaaaagccgaccatcttgtggattcgccccgccgaagtgtccgtcgaggccggcagccgaaatgagcccgcgttcgcgaggtcagaagcagccagagcgaaggcccccgatggggcctgccagggaacccaacgaaaggcgggacctggccagcagctacgtttgcaggaaaggtcaagacctatgccgggatgtagtgatctcgtctacccagtcccggcctcttggagtctcgacccggaagatcaacgccccagcggttcggccgggggagagaaaggtcctcgcgaggggacatcgcgtcgggcgaccgcgcgacgcccgccgtcaggcgggtgagacaagtcgagacatgttcttcctgcaaacattggctggggatagacgagaaccttattcgcccgcatgatgcgagcagattgccacgcaggccgacggcggcgctacagcgccagcagcgccccggagggtgtcagctggcgactgcgctgaagccccagcacgggcgcgcggcggcgcgcagggcgagcttcatgctccagcccgacgagatcatgtgatcgacgacgagggcggatgagagatccccggcttgggctccgttcccgggctctgccttgaccacgccgcgggcatgcggtatcatccgcgccggaaaggggatcccctatggaacctgccaaggacacacgactcgagcagggaagctacttcgatgcctacagccatttcgccaggacactgcgcctctggttcatcgcctacggcgtcggcgcccccatcgccatttgctctagcgaccgtctcttggacgccgttgtcgctgcgcgcagtctcaaccccgtcgtgcctttgttcttcgctgggatcgcggtccaaatcatgatggcgatgatctggcgcacggctctctggtatcagtaccgggccgagtacaagccgaactcaatgagcacctggcgctaccgcgcttcctgccggatctccgaccagtactggcttgagttcctcgccgatctgtttacgctcgtcctgttcgcctacgcaacctgggtcgccgtctcggcgatctgtatgcacatgtccggcacgcttccgggatccgcgctatcgtaatcacgggatcgcaacgccggccgaaccgtcaatcgaagggaacccaccatgaacctcaaggagttcatcacccagacgctcacggagatcgccgaaggcatccgcgatgcgaatgagcccgtccaacaggccgggggacgagccgtcccggcggttgactttgtcgcgttcgatgacgacaggcctcagtcgccgatccagttggtcgacttcgatgttgccgtaacagcacaggaagagagcgctacgaaggtggggggcggcctgctcatcgccgggatcggcctcggcggcaagacggagacgcaagcacaggctagctccgtcagccgcattcgcttccgcgtgccgatgatgctcccgccatcctacaaccaatgagcggccgggtggcaaggcgcgcaccgagtacattgacgaagggaacatcgcggttcggccaagccggcggactacgatcgacatctgagccgcggcgcgcctcagcacctcacgggggcgaagccctagcaggcgccggcggctgcgcggaggccggggccgtctgtggcgatcgtcgagcaaccttgcgggggggctgcgagacggctacaaacgcggcaagggcagagtagggcataggtgggatagagaaagggcgagcagatgccgaacaacaagaagctcgggacccccagaccgtggactatggtgatggtggcactctgcatggtcatcgccattgtcctcattgtcttcctatactgcgtctataccagggaggcgagctgcacgccgcactcctttccttcggtgcgtcggctccgcagcccaaggcaatcggcctggatgtggtcgccacggtcgagggcttctacgcaagggcgtggacgatgttgatgggagccggcgggatggctggcgtgatcctcctcgtaatcgtgccgcttgtcttgcagcgcctccagtctcagtccttccgagatcacaaggaggacttccgggaacgcgctgcggatgacaccaagaagctccttcaacggacacgcgaggaactcaggaccacgatggagagccacacgaagaagctccttaccacgatggagagcgacacgaagaagctccttgaacggacacggggcgaactcagtaccagcatggagagcctaatgctgggatacgctctgtgggggcaggcaaatgccagaggcgcagacgaccagcatatgcgcgtcctcgacttccttaaagccgcacaagccttcaagcgggccaagaagccaggcctcattgcacgcgccctgcaatgggcccagatctgccttggccggcgggctgtaaatgtcgcagtgttcgcccaggatgccaatctagagagccagatacaatccgccatattggggcttaagctgccagacaacgaaacccagggtctgcttcgctcccttaacgaggcgcgcgagcgtcctgcgcctgggtcggaagactcaagggcagagcaacccgaggggcccggaccggagacggcggagtaacgacaagaggccctcttccgtgccgattgcgccgggctcgtcaagaagccagcggcgggcgagctgggagcggggtgaggctggttgctcgccgtcggcgggcgccaggttgaggcgcagcagagcgggcaggacgttctggtcggtctcggctccgcggcagcgtaggtagccgcgacatggcgatgaagcccgcgggggtcattcccccggatgcgctgtacccgctcatacgcggcattatcgcgcgggcgaggctgccgggcaagggcgcggatcagcccgctgcgcgccgcgcggccgcgtggggccggcggggggcctgctcgcacacgagggaggcatcgtcgcggatggtgctgtcgaggtcgtcgggcggcgagtctcccgaacggcgagatggccgggggctcctgtggctgaagccgccgatgggaagcccgttgaaacgggctaagcttcttcctggccacgtgttaccatggctgaagccatggactacaccccagcttgctcggacaggtggcgctgtagtgctgagctgcctggaggaatggctgagctgcgtgcaacgtttggtgcacgcagttcagccggcgaacatctgccgcaggacctgggggacctggaagaggcagaagtaggcgaagacgaggaacgccaccagcaggacggcggcgtggtaccacc

SEQ ID NO: 89 - DNA, 13627 bp, Artificial Sequence
  Synthetic
  misc_feature (1)..(8170): n is a, c, g, or t
nnnnnnnnnnnnnnnnnnnnnnnnnnnnnnnnnnnnnnnnnnnnnnnnnnnnnnnnnnnnnnnnnnnnnnnnnnnnnnnnnnnnnnnnnnnnnnnnnnnnnnnnnnnnnnnnnnnnnnnnnnnnnnnnnnnnnnnnnnnnnnnnnnnnnnnnnnnnnnnnnnnnnnnnnnnnnnnnnnnnnnnnnnnnnnnnnnnnnnnnnnnnnnnnnnnnnnnnnnnnnnnnnnnnnnnnnnnnnnnnnnnnnnnnnnnnnnnnnnnnnnnnnnnnnnnnnnnnnnnnnnnnnnnnnnnnnnnnnnnnnnnnnnnnnnnnnnnnnnnnnnnnnnnnnnnnnnnnnnnnnnnnnnnnnnnnnnnnnnnnnnnnnnnnnnnnnnnnnnnnnnnnnnnnnnnnnnnnnnnnnnnnnnnnnnnnnnnnnnnnnnnnnnnnnnnnnnnnnnnnnnnnnnnnnnnnnnnnnnnnnnnnnnnnnnnnnnnnnnnnnnnnnnnnnnnnnnnnnnnnnnnnnnnnnnnnnnnnnnnnnnnnnnnnnnnnnnnnnnnnnnnnnnnnnnnnnnnnnnnnnnnnnnnnnnnnnnnnnnnnnnnnnnnnnnnnnnnnnnnnnnnnnnnnnnnnnnnnnnnnnnnnnnnnnnnnnnnnnnnnnnnnnnnnnnnnnnnnnnnnnnnnnnnnnnnnnnnnnnnnnnnnnnnnnnnnnnnnnnnnnnnnnnnnnnnnnnnnnnnnnnnnnnnnnnnnnnnnnnnnnnnnnnnnnnnnnnnnnnnnnnnnnnnnnnnnnnnnnnnnnnnnnnnnnnnnnnnnnnnnnnnnnnnnnnnnnnnnnnnnnnnnnnnnnnnnnnnnnnnnnnnnnnnnnnnnnnnnnnnnnnnnnnnnnnnnnnnnnnnnnnnnnnnnnnnnnnnnnnnnnnnnnnnnnnnnnnnnnnnnnnnnnnnnnnnnnnnnnnnnnnnnnnnnnnnnnnnnnnnnnnnnnnnnnnnnnnnnnnnnnnnnnnnnnnnnnnnnnnnnnnnnnnnnnnnnnnnnnnnnnnnnnnnnnnnnnnnnnnnnnnnnnnnnnnnnnnnnnnnnnnnnnnnnnnnnnnnnnnnnnnnnnnnnnnnnnnnnnnnnnnnnnnnnnnnnnnnnnnnnnnnnnnnnnnnnnnnnnnnnnnnnnnnnnnnnnnnnnnnnnnnnnnnnnnnnnnnnnnnnnnnnnnnnnnnnnnnnnnnnnnnnnnnnnnnnnnnnnnnnnnnnnnnnnnnnnnnnnnnnnnnnnnnnnnnnnnnnnnnnnnnnnnnnnnnnnnnnnnnnnnnnnnnnnnnnnnnnnnnnnnnnnnnnnnnnnnnnnnnnnnnnnnnnnnnnnnnnnnnnnnnnnnnnnnnnnnnnnnnnnnnnnnnnnnnnnnnnnnnnnnnnnnnnnnnnnnnnnnnnnnnnnnnnnnnnnnnnnnnnnnnnnnnnnnnnnnnnnnnnnnnnnnnnnnnnnnnnnnnnnnnnnnnnnnnnnnnnnnnnnnnnnnnnnnnnnnnnnnnnnnnnnnnnnnnnnnnnnnnnnnnnnnnnnnnnnnnnnnnnnnnnnnnnnnnnnnnnnnnnnnnnnnnnnnnnnnnnnnnnnnnnnnnnnnnnnnnnnnnnnnnnnnnnnnnnnnnnnnnnnnnnnnnnnnnnnnnnnnnnnnnnnnnnnnnnnnnnnnnnnnnnnnnnnnnnnnnnnnnnnnnnnnnnnnnnnnnnnnnnnnnnnnnnnnnnnnnnnnnnnnnnnnnnnnnnnnnnnnnnnnnnnnnnnnnnnnnnnnnnnnnnnnnnnnnnnnnnnnnnnnnnnnnnnnnnnnnnnnnnnnnnnnnnnnnnnnnnnnnnnnnnnnnnnnnnnnnnnnnnnnnnnnnnnnnnnnnnnnnnnnnnnnnnnnnnnnnnnnnnnnnnnnnnnnnnnnnnnnnnnnnnnnnnnnnnnnnnnnnnnnnnnnnnnnnnnnnnnnnnnnnnnnnnnnnnnnnnnnnnnnnnnnnnnnnnnnnnnnnnnnnnnnnnnnnnnnnnnnnnnnnnnnnnnnnnnnnnnnnnnnnnnnnnnnnnnnnnnnnnnnnnnnnnnnnnnnnnnnnnnnnnnnnnnnnnnnnnnnnnnnnnnnnnnnnnnnnnnnnnnnnnnnnnnnnnnnnnnnnnnnnnnnnnnnnnnnnnnnnnnnnnnnnnnnnnnnnnnnnnnnnnnnnnnnnnnnnnnnnnnnnnnnnnnnnnnnnnnnnnnnnnnnnnnnnnnnnnnnnnnnnnnnnnnnnnnnnnnnnnnnnnnnnnnnnnnnnnnnnnnnnnnnnnnnnnnnnnnnnnnnnnnnnnnnnnnnnnnnnnnnnnnnnnnnnnnnnnnnnnnnnnnnnnnnnnnnnnnnnnnnnnnnnnnnnnnnnnnnnnnnnnnnnnnnnnnnnnnnnnnnnnnnnnnnnnnnnnnnnnnnnnnnnnnnnnnnnnnnnnnnnnnnnnnnnnnnnnnnnnnnnnnnnnnnnnnnnnnnnnnnnnnnnnnnnnnnnnnnnnnnnnnnnnnnnnnnnnnnnnnnnnnnnnnnnnnnnnnnnnnnnnnnnnnnnnnnnnnnnnnnnnnnnnnnnnnnnnnnnnnnnnnnnnnnnnnnnnnnnnnnnnnnnnnnnnnnnnnnnnnnnnnnnnnnnnnnnnnnnnnnnnnnnnnnnnnnnnnnnnnnnnnnnnnnnnnnnnnnnnnnnnnnnnnnnnnnnnnnnnnnnnnnnnnnnnnnnnnnnnnnnnnnnnnnnnnnnnnnnnnnnnnnnnnnnnnnnnnnnnnnnnnnnnnnnnnnnnnnnnnnnnnnnnnnnnnnnnnnnnnnnnnnnnnnnnnnnnnnnnnnnnnnnnnnnnnnnnnnnnnnnnnnnnnnnnnnnnnnnnnnnnnnnnnnnnnnnnnnnnnnnnnnnnnnnnnnnnnnnnnnnnnnnnnnnnnnnnnnnnnnnnnnnnnnnnnnnnnnnnnnnnnnnnnnnnnnnnnnnnnnnnnnnnnnnnnnnnnnnnnnnnnnnnnnnnnnnnnnnnnnnnnnnnnnnnnnnnnnnnnnnnnnnnnnnnnnnnnnnnnnnnnnnnnnnnnnnnnnnnnnnnnnnnnnnnnnnnnnnnnnnnnnnnnnnnnnnnnnnnnnnnnnnnnnnnnnnnnnnnnnnnnnnnnnnnnnnnnnnnnnnnnnnnnnnnnnnnnnnnnnnnnnnnnnnnnnnnnnnnnnnnnnnnnnnnnnnnnnnnnnnnnnnnnnnnnnnnnnnnnnnnnnnnnnnnnnnnnnnnnnnnnnnnnnnnnnnnnnnnnnnnnnnnnnnnnnnnnnnnnnnnnnnnnnnnnnnnnnnnnnnnnnnnnnnnnnnnnnnnnnnnnnnnnnnnnnnnnnnnnnnnnnnnnnnnnnnnnnnnnnnnnnnnnnnnnnnnnnnnnnnnnnnnnnnnnnnnnnnnnnnnnnnnnnnnnnnnnnnnnnnnnnnnnnnnnnnnnnnnnnnnnnnnnnnnnnnnnnnnnnnnnnnnnnnnnnnnnnnnnnnnnnnnnnnnnnnnnnnnnnnnnnnnnnnnnnnnnnnnnnnnnnnnnnnnnnnnnnnnnnnnnnnnnnnnnnnnnnnnnnnnnnnnnnnnnnnnnnnnnnnnnnnnnnnnnnnnnnnnnnnnnnnnnnnnnnnnnnnnnnnnnnnnnnnnnnnnnnnnnnnnnnnnnnnnnnnnnnnnnnnnnnnnnnnnnnnnnnnnnnnnnnnnnnnnnnnnnnnnnnnnnnnnnnnnnnnnnnnnnnnnnnnnnnnnnnnnnnnnnnnnnnnnnnnnnnnnnnnnnnnnnnnnnnnnnnnnnnnnnnnnnnnnnnnnnnnnnnnnnnnnnnnnnnnnnnnnnnnnnnnnnnnnnnnnnnnnnnnnnnnnnnnnnnnnnnnnnnnnnnnnnnnnnnnnnnnnnnnnnnnnnnnnnnnnnnnnnnnnnnnnnnnnnnnnnnnnnnnnnnnnnnnnnnnnnnnnnnnnnnnnnnnnnnnnnnnnnnnnnnnnnnnnnnnnnnnnnnnnnnnnnnnnnnnnnnnnnnnnnnnnnnnnnnnnnnnnnnnnnnnnnnnnnnnnnnnnnnnnnnnnnnnnnnnnnnnnnnnnnnnnnnnnnnnnnnnnnnnnnnnnnnnnnnnnnnnnnnnnnnnnnnnnnnnnnnnnnnnnnnnnnnnnnnnnnnnnnnnnnnnnnnnnnnnnnnnnnnnnnnnnnnnnnnnnnnnnnnnnnnnnnnnnnnnnnnnnnnnnnnnnnnnnnnnnnnnnnnnnnnnnnnnnnnnnnnnnnnnnnnnnnnnnnnnnnnnnnnnnnnnnnnnnnnnnnnnnnnnnnnnnnnnnnnnnnnnnnnnnnnnnnnnnnnnnnnnnnnnnnnnnnnnnnnnnnnnnnnnnnnnnnnnnnnnnnnnnnnnnnnnnnnnnnnnnnnnnnnnnnnnnnnnnnnnnnnnnnnnnnnnnnnnnnnnnnnnnnnnnnnnnnnnnnnnnnnnnnnnnnnnnnnnnnnnnnnnnnnnnnnnnnnnnnnnnnnnnnnnnnnnnnnnnnnnnnnnnnnnnnnnnnnnnnnnnnnnnnnnnnnnnnnnnnnnnnnnnnnnnnnnnnnnnnnnnnnnnnnnnnnnnnnnnnnnnnnnnnnnnnnnnnnnnnnnnnnnnnnnnnnnnnnnnnnnnnnnnnnnnnnnnnnnnnnnnnnnnnnnnnnnnnnnnnnnnnnnnnnnnnnnnnnnnnnnnnnnnnnnnnnnnnnnnnnnnnnnnnnnnnnnnnnnnnnnnnnnnnnnnnnnnnnnnnnnnnnnnnnnnnnnnnnnnnnnnnnnnnnnnnnnnnnnnnnnnnnnnnnnnnnnnnnnnnnnnnnnnnnnnnnnnnnnnnnnnnnnnnnnnnnnnnnnnnnnnnnnnnnnnnnnnnnnnnnnnnnnnnnnnnnnnnnnnnnnnnnnnnnnnnnnnnnnnnnnnnnnnnnnnnnnnnnnnnnnnnnnnnnnnnnnnnnnnnnnnnnnnnnnnnnnnnnnnnnnnnnnnnnnnnnnnnnnnnnnnnnnnnnnnnnnnnnnnnnnnnnnnnnnnnnnnnnnnnnnnnnnnnnnnnnnnnnnnnnnnnnnnnnnnnnnnnnnnnnnnnnnnnnnnnnnnnnnnnnnnnnnnnnnnnnnnnnnnnnnnnnnnnnnnnnnnnnnnnnnnnnnnnnnnnnnnnnnnnnnnnnnnnnnnnnnnnnnnnnnnnnnnnnnnnnnnnnnnnnnnnnnnnnnnnnnnnnnnnnnnnnnnnnnnnnnnnnnnnnnnnnnnnnnnnnnnnnnnnnnnnnnnnnnnnnnnnnnnnnnnnnnnnnnnnnnnnnnnnnnnnnnnnnnnnnnnnnnnnnnnnnnnnnnnnnnnnnnnnnnnnnnnnnnnnnnnnnnnnnnnnnnnnnnnnnnnnnnnnnnnnnnnnnnnnnnnnnnnnnnnnnnnnnnnnnnnnnnnnnnnnnnnnnnnnnnnnnnnnnnnnnnnnnnnnnnnnnnnnnnnnnnnnnnnnnnnnnnnnnnnnnnnnnnnnnnnnnnnnnnnnnnnnnnnnnnnnnnnnnnnnnnnnnnnnnnnnnnnnnnnnnnnnnnnnnnnnnnnnnnnnnnnnnnnnnnnnnnnnnnnnnnnnnnnnnnnnnnnnnnnnnnnnnnnnnnnnnnnnnnnnnnnnnnnnnnnnnnnnnnnnnnnnnnnnnnnnnnnnnnnnnnnnnnnnnnnnnnnnnnnnnnnnnnnnnnnnnnnnnnnnnnnnnnnnnnnnnnnnnnnnnnnnnnnnnnnnnnnnnnnnnnnnnnnnnnnnnnnnnnnnnnnnnnnnnnnnnnnnnnnnnnnnnnnnnnnnnnnnnnnnnnnnnnnnnnnnnnnnnnnnnnnnnnnnnnnnnnnnnnnnnnnnnnnnnnnnnnnnnnnnnnnnnnnnnnnnnnnnnnnnnnnnnnnnnnnnnnnnnnnnnnnnnnnnnnnnnnnnnnnnnnnnnnnnnnnnnnnnnnnnnnnnnnnnnnnnnnnnnnnnnnnnnnnnnnnnnnnnnnnnnnnnnnnnnnnnnnnnnnnnnnnnnnnnnnnnnnnnnnnnnnnnnnnnnnnnnnnnnnnnnnnnnnnnnnnnnnnnnnnnnnnnnnnnnnnnnnnnnnnnnnnnnnnnnnnnnnnnnnnnnnnnnnnnnnnnnnnnnnnnnnnnnnnnnnnnnnnnnnnnnnnnnnnnnnnnnnnnnnnnnnnnnnnnnnnnnnnnnnnnnnnnnnnnnnnnnnnnnnnnnnnnnnnnnnnnnnnnnnnnnnnnnnnnnnnnnnnnnnnnnnnnnnnnnnnnnnnnnnnnnnnnnnnnnnnnnnnnnnnnnnnnnnnnnnnnnnnnnnnnnnnnnnnnnnnnnnnnnnnnnnnnnnnnnnnnnnnnnnnnnnnnnnnnnnnnnnnnnnnnnnnnnnnnnnnnnnnnnnnnnnnnnnnnnnnnnnnnnnnnnnnnnnnnnnnnnnnnnnnnnnnnnnnnnnnnnnnnnnnnnnnnnnnnnnnnnnnnnnnnnnnnnnnnnnnnnnnnnnnnnnnnnnnnnnnnnnnnnnnnnnnnnnnnnnnnnnnnnnnnnnnnnnnnnnnnnnnnnnnnnnnnnnnnnnnnnnnnnnnnnnnnnnnnnnnnnnnnnnnnnnnnnnnnnnnnnnnnnnnnnnnnnnnnnnnnnnnnnnnnnnnnnnnnnnnnnnnnnnnnnnnnnnnnnnnnnnnnnnnnnnnnnnnnnnnnnnnnnnnnnnnnnnnnnnnnnnnnnnnnnnnnnnnnnnnnnnnnnnnnnnnnnnnnnnnnnnnnnnnnnnnnnnnnnnnnnnnnnnnnnnnnnnnnnnnnnnnnnnnnnnnnnnnnnnnnnnnnnnnnnnnnnnnnnnnnnnnnnnnnnnnnnnnnnnnnnnnnnnnnnnnnnnnnnnnnnnnnnnnnnnnnnnnnnnnnnnnnnnnnnnnnnnnnnnnnnnnnnnnnnnnnnnnnnnnnnnnnnnnnnnnnnnnnnnnnnnnnnnnnnnnnnnnnnnnnnnnnnnnnnnnnnnnnnnnnnnnnnnnnnnnnnnnnnnnnnnnnnnnnnnnnnnnnnnnnnnnnnnnnnnnnnnnnnnnnnnnnnnnnnnnnnnnnnnnnnnnnnnnnnnnnnnnnnnnnnnnnnnnnnnnnnnnnnnnnnnnnnnnnnnnnnnnnnnnnnnnnnnnnnnnnnnnnnnnnnnnnnnnnnnnnnnnnnnnnnnnnnnnnnnnnnnnnnnnnnnnnnnnnnnnnnnnnnnnnnnnnnnnnnnnnnnnnnnnnnnnnnnnnnnnnnnnnnnnnnnnnnnnnnnnnnnnnnnnnnnnnnnnnnnnnnnnnnnnnnnnnnnnnnnnnnnnnnnnnnnnnnnnnnnnnnnnnnnnnnnnnnnnnnnnnnnnnnnnnnnnnnnnnnnnnnnnnnnnnnnnnnnnnnnnnnnnnnnnnnnnnnnnnnnnnnnnnnnnnnnnnnnnnnnnnnnnnnnnnnnnnnnnnnnnnnnnnnnnnnnnnnnnnnnnnnnnnnnnnnnnnnnnnnnnnnnnnnnnnnnnnnnnnnnnnnnnnnnnnnnnnnnnnnnnnnnnnnnnnnnnnnnnnnnnnnnnnnnnnnnnnnnnnnnnnnnnnnnnnnnnnnnnnnnnnnnnnnnnnnnnnnnnnnnnnnnnnnnnnnnnnnnnnnnnnnnnnnnnnnnnnnnnnnnnnnnnnnnnnnnnnnnnnnnnnnnnnnnnnnnnnnnnnnnnnnnnnnnnnnnnnnnnnnnnnnnnnnnnnnnnnnnnnnnnnnnnnnnnnnnnnnnnnnnnnnnnnnnnnnnnnnnnnnnnnnnnnnnnnnnnnnnnnnnnnnnnnnnnnnnnnnnnnnnnnnnnnnnnnnnnnnnnnnnnnnnnnnnnnnnnnnnnnnnnnnnnnnnnnnnnnnnnnnnnnnnnnnnnnnnnnnnnnnnnnnnnnnnnnnnnnnnnnnnnnnnnnnnnnnnnnnnnnnnnnnnnnnnnnnnnnnnnnnnnnnnnnnnnnnnnnnnnnnnnnnnnnnnnnnnnnnnnnnnnnnnnnnnnnnnnnnnnnnnnnnnnnnnnnnnnnnnnnnnnnnnnnnnnnnnnnnnnnnnnnnnnnnnnnnnnnnnnnnnnnnnnnnnnnnnnnnnnnnnnnnnnnnnnnnnnnnnnnnnnnnnnnnnnnnnnnnnnnnnnnnnnnnnnnnnnnnnnnnnnnnnnnnnnnnnnnnnnnnnnnnnnnnnnnnnnnnnnnnnnnnnnnnnnnnnnnnnnnnnnnnnnnnnnnnnnnnnnnnnnnnnnnnnnnnnnnnccgccggcctggccgcctcaggagggcctgcccgccggaggcgggccgttgctgttgtagggcgggcgtgcctacgcccgccggatgttgcccgtccgccatagctttagcgacggcggaaacttcagcgaaggcgggttccggtggcgcagaggcgcactctgcggccgttactgtcgctgtagggcgggcgtgcctacgcccgccggatgttgcccgttgtagcgcgggcgtgtggctagatcgcctacggcgaccgctggctaggttggcctacagccaaccgccatggtggccctcgggcctagcgacatcccggtccgaaggacttagggacctacgcccgccgcggtgggagcccggtcccccgggcgactgcgctcgaagcgaactctcccccgtagggcaggagcccctaggtccgccaaagccggccggggtggcggtctgcctttggcagacctagccacgagtctcctgccaagtcgtctgccgttctgtagggtcgggcacacccttgcccgccggcctgcccgccggaggagggcctgcccgccggagaaggggcgtttccgttgggcctgggccagtttaccctgagcgaagtcgaagggcctcctggcacgtgcggtagggtcgggcgtacctacgccgccaaccttgtgcgtagacaggaaggtgattgcctgtagcaagacgaaggtgttcaatgctatactttcgtcactcgagagacggagtcgcaccttgacaatggatgacgctgcccaccagggcgggctttagacggagagtgcgaactgctgtttgctatttcgccctcgcattggtggacagcacgagctggacggtgttgccagcgccgatctcgaggccatttcgccctcgcattggtggacagcacgccagctcgcgctgtacaacgcgcagtgggttcatttcgccctcgcattggtggacagcacgcaccaggccatccaccgggtggcctgtggcgaatttcgccctcgcattggtggacagcaccggccgaggcgtttttgaggtatctcgtcgagtaatttcgccctcgcattggtggacagcactgttggcctgcacggtctgctcgacgtaatcggtaatttcgccctcgcattggtggacagcactcacaccaggccatcggcaacggtggcctgtggcgaatttcgccctcgcattggtggacagcacgctgacgaatgtggccgtcgcgacctgggacggatttcgccctcgcattggtggacagcacggccgacgggcatatacccctgtatgggatgcaatttcgccctcgcattggtggacagcacggttgtgccgagactccgggtcggctctctctcatttcgccctcgcattggtggacagcacgtcggcgagcaatcagcgtcccccgaaggaggaatttcgccctcgcattggtggacagcacgggttctggggcgatcagcgaggggagcgagggcgcgcgaggaatgagttggggacgcagtaggtatgtataggtttccaccagtgttgaagggcgaaagcagcccagccaagtctccgcccatggcggagcacgggaaaccggtggggaaacccggccggccaccgtaaggaggcacgtttggggaacaggtaggggtaaccctgagtgcaacctggggtgcaccttcagctccaggctctgcaaggctcggcccagaggattaacgccctaatccgcctctggcggaagggagagaaaggcggtcgtgaggccgcaaggcaagccgagccatactcctgtacccaaacctgagcgggaaggagaacaagtgaatacggaaacgcgagagcaggtgttggggattgacttcggcccgaagcacgtgggaattgctctcgtggcgaggggggcctcgtcggaggaagtcctcttcgtcgcggaggtgcggctgagggaccgcaagtcgctgctggccgaccggcgggcgctgcggcgcgggcggcgaggcaggaagcgctaccgccagcccaagattccacagcggggcggtggcgcgacgtcgcaaagcggcgaggagagcgagagggggcgcgccgcagccccggagtatcgtcgcgccacagggctcaacacagggcgacgacgctgcaagtttgtcgacccccagacgggtgaaatatgcgggtggaatacgccccgcaaggccaacgtccgcgacctcctgctgtggaacatctgccgccaccttccggtgtctgtctccgagcaggcggggttcctcgcttacgtcaaccagacgaacctccaccgcgcggagatactgggtgctctgccggcggaagagcaggccccgctggaggccgtgttctcgcaacagcggcggccgaaagacgagcggctgaaggaccggctacgaaggctcggcgttgaccggcacctgcgctcgcaggtcacggacatcgttggcatcacctctcgccggccgctcagcgggcggctgtctttctgccgcgagcatttcctgcgccaccacgagcagagccgcgttccccggcccagcgtgtggctcccgaacactgttgagatgaagcaagcggatgtgctaaaggtctgccggcaggaggtcgcgccgcgctggcgtgttgactgcatagtgctagagcgggccaacttcgacttgcagcttctccggcagcagaccgccatcgaatggtcggtggaggactggcagcgcggcccgcggtggggctaccgcaacaccttcgaggcgaagaagcaggagcaggggaaccgctgcgcctactgcggcagcaagccgacggcgaagaaccggctgaggctggaactggagcacgtcattccaggtgggggcgacacgtgggagaacctggtgctaagctgccggaagtgcaacgagggcaagggtaatcgcagccctgcgcaggccggcatgcgcttctggacggacaccgagacgggagagacgctctccccggcgccgctcggcgccgcgcacgtttcccgctacatgacccagacggaccaggggtggcgtcgccttcaggccgcgctacagcaggtcttcccccaggccgcagtcgagcacacctgggggtacgtgacgagcttctaccgtaaccgctggaacctccccaagaagcacttcgtggacgcggccgtcatcgccagctcgcacgagcttgagcgccccgtgtccgtgcccgaacagccccagcggtttgctccgacatccggcggcaagcagctcttcgacacgaaccccctctcaaagcggccggaggggcgcttcgctcagagcaaggcgattgtgtgcgagcaggggacgctcgccttcaaagatgtcgccaaggtagagaacccgcgcaagcgcgccacgcttcagcgcgtcgcggatgaggccaccgcagcagcaaaggcgcggggcgaaaccccgcccaccgcgttcaccgctgaaatgctgccgaagataccattcaagtctgtgcgccttgccaagcaggacgctagcgacaccaacacacgccgactcggccggcattggttcaaggtcgcaagcgccgtgaatatcgcgaccatcgtctaccagctcgacgggaaggtttgcatgcaactccaacgcaaccccgcggtcttccgtcatgaccctggcttgccgcagggggcgcgcgttgtcgccaccttccgcaagggcgacctggtggagtgtgacgcgggccgcggtcgggtaacgaagaaccacagtaactgcactctcaccgtcgaactgctggacagtggcaaggaggtgacgaggctggcgaagtcgttcaggccgcggcatggctaggatgtaatggttgaccaggcggtgggagcccagttcgttccccacgagaagacaacggttctccccccgcgcgcagggccggcggggttcggcttccccgccctacactcggcccctccgcgccctctgcgtctttgcgcttgcccgcctccggcggggtgaactgccgttgccgttccgcctcctctgcgccatttgggtaatctgtggtccccccccggccgttctctgtgtctttgtggtgaactgccgttgttgttccgtctctgcggttcaactatttcttcccccaaaatctaagcagctcttgacaaacccctcttgcttgcgaatctgccccacaatgcccctattcgagcgcgcgcgtttccggtcactaagaggacgctaagagaacgactcgccaaaggaccccgcgggcccgtcggcaagccgattctcgactttcgaccttcggttctctcccttgccctcgctcctggagtcctctatgccccttgtagaccgaccgcgaaaacgcgatcctgtgaaatctgacggttttgacccctcacttagcggctcttgacaaaccgggtcgcccgatggatttcgcccacaaagcgccaggttgccacgcgaccggcttgtgcaatctgacgcttactaagcattgttccacgtggaacatttcggcccagaacgcacgacgatgccttctgcgagatcgcagatcgcgacaggaaggccgctcctacgggattgcccctccatctcacccgcgccctgttttgtggaataggtggcagggaatgcagccactcttcgcagcagcgtgagggagacgatagatggaggcagggaggcaagggtccgcgctcgcggtgcgggcgcagcggcggcgcggggttgacgcagcggtctgtgccggcctcttcctcatctctctgctcgcttacctccgcacgatgcggccgacgttcggttggggggattcgagcgagctgatcacggccgcctactaccttggggtgggccactcgcctggctatccgacctggctgctgctggcctatccgttcagccacttgcccttcggcgatgtcgccttccgcgtgaacttcatgaccgtgctggtgggtgcggtgggggtggcgttgctctatctgctctactccaagatcagcgggagccggcccgcggccgtcatcgcggccctgacctttgccctttccgccaccttctgggatcagacgacggaggccgaggtctacacgctgcacgtctgcctcgccgcgacgatactgctgattctgctggcgtggcgaagcacaggtgttgatcgccggctctacctgctcgcgtgggtgatcggaatcagcctcggcaatcacgcgctgacggccttgatgatccccgcgatcctatacttcgtgtgggcggagaaggggctgcggttcttcacgcgaaggcgcctcctcacctgcgcggggttcttcgtgcttgggctgtcgatctacgtgtatgagccgattcgggccctggacaacccgccgccccacatcaacaacccgcacaacctgatcgagatgtgggcgcagctcaccgcgccgggcgcccggcaggcgat

SEQ ID NO: 90 - DNA, 14121 bp, Artificial Sequence
  Synthetic
  misc_feature (1)..(9257): n is a, c, g, or t
nnnnnnnnnnnnnnnnnnnnnnnnnnnnnnnnnnnnnnnnnnnnnnnnnnnnnnnnnnnnnnnnnnnnnnnnnnnnnnnnnnnnnnnnnnnnnnnnnnnnnnnnnnnnnnnnnnnnnnnnnnnnnnnnnnnnnnnnnnnnnnnnnnnnnnnnnnnnnnnnnnnnnnnnnnnnnnnnnnnnnnnnnnnnnnnnnnnnnnnnnnnnnnnnnnnnnnnnnnnnnnnnnnnnnnnnnnnnnnnnnnnnnnnnnnnnnnnnnnnnnnnnnnnnnnnnnnnnnnnnnnnnnnnnnnnnnnnnnnnnnnnnnnnnnnnnnnnnnnnnnnnnnnnnnnnnnnnnnnnnnnnnnnnnnnnnnnnnnnnnnnnnnnnnnnnnnnnnnnnnnnnnnnnnnnnnnnnnnnnnnnnnnnnnnnnnnnnnnnnnnnnnnnnnnnnnnnnnnnnnnnnnnnnnnnnnnnnnnnnnnnnnnnnnnnnnnnnnnnnnnnnnnnnnnnnnnnnnnnnnnnnnnnnnnnnnnnnnnnnnnnnnnnnnnnnnnnnnnnnnnnnnnnnnnnnnnnnnnnnnnnnnnnnnnnnnnnnnnnnnnnnnnnnnnnnnnnnnnnnnnnnnnnnnnnnnnnnnnnnnnnnnnnnnnnnnnnnnnnnnnnnnnnnnnnnnnnnnnnnnnnnnnnnnnnnnnnnnnnnnnnnnnnnnnnnnnnnnnnnnnnnnnnnnnnnnnnnnnnnnnnnnnnnnnnnnnnnnnnnnnnnnnnnnnnnnnnnnnnnnnnnnnnnnnnnnnnnnnnnnnnnnnnnnnnnnnnnnnnnnnnnnnnnnnnnnnnnnnnnnnnnnnnnnnnnnnnnnnnnnnnnnnnnnnnnnnnnnnnnnnnnnnnnnnnnnnnnnnnnnnnnnnnnnnnnnnnnnnnnnnnnnnnnnnnnnnnnnnnnnnnnnnnnnnnnnnnnnnnnnnnnnnnnnnnnnnnnnnnnnnnnnnnnnnnnnnnnnnnnnnnnnnnnnnnnnnnnnnnnnnnnnnnnnnnnnnnnnnnnnnnnnnnnnnnnnnnnnnnnnnnnnnnnnnnnnnnnnnnnnnnnnnnnnnnnnnnnnnnnnnnnnnnnnnnnnnnnnnnnnnnnnnnnnnnnnnnnnnnnnnnnnnnnnnnnnnnnnnnnnnnnnnnnnnnnnnnnnnnnnnnnnnnnnnnnnnnnnnnnnnnnnnnnnnnnnnnnnnnnnnnnnnnnnnnnnnnnnnnnnnnnnnnnnnnnnnnnnnnnnnnnnnnnnnnnnnnnnnnnnnnnnnnnnnnnnnnnnnnnnnnnnnnnnnnnnnnnnnnnnnnnnnnnnnnnnnnnnnnnnnnnnnnnnnnnnnnnnnnnnnnnnnnnnnnnnnnnnnnnnnnnnnnnnnnnnnnnnnnnnnnnnnnnnnnnnnnnnnnnnnnnnnnnnnnnnnnnnnnnnnnnnnnnnnnnnnnnnnnnnnnnnnnnnnnnnnnnnnnnnnnnnnnnnnnnnnnnnnnnnnnnnnnnnnnnnnnnnnnnnnnnnnnnnnnnnnnnnnnnnnnnnnnnnnnnnnnnnnnnnnnnnnnnnnnnnnnnnnnnnnnnnnnnnnnnnnnnnnnnnnnnnnnnnnnnnnnnnnnnnnnnnnnnnnnnnnnnnnnnnnnnnnnnnnnnnnnnnnnnnnnnnnnnnnnnnnnnnnnnnnnnnnnnnnnnnnnnnnnnnnnnnnnnnnnnnnnnnnnnnnnnnnnnnnnnnnnnnnnnnnnnnnnnnnnnnnnnnnnnnnnnnnnnnnnnnnnnnnnnnnnnnnnnnnnnnnnnnnnnnnnnnnnnnnnnnnnnnnnnnnnnnnnnnnnnnnnnnnnnnnnnnnnnnnnnnnnnnnnnnnnnnnnnnnnnnnnnnnnnnnnnnnnnnnnnnnnnnnnnnnnnnnnnnnnnnnnnnnnnnnnnnnnnnnnnnnnnnnnnnnnnnnnnnnnnnnnnnnnnnnnnnnnnnnnnnnnnnnnnnnnnnnnnnnnnnnnnnnnnnnnnnnnnnnnnnnnnnnnnnnnnnnnnnnnnnnnnnnnnnnnnnnnnnnnnnnnnnnnnnnnnnnnnnnnnnnnnnnnnnnnnnnnnnnnnnnnnnnnnnnnnnnnnnnnnnnnnnnnnnnnnnnnnnnnnnnnnnnnnnnnnnnnnnnnnnnnnnnnnnnnnnnnnnnnnnnnnnnnnnnnnnnnnnnnnnnnnnnnnnnnnnnnnnnnnnnnnnnnnnnnnnnnnnnnnnnnnnnnnnnnnnnnnnnnnnnnnnnnnnnnnnnnnnnnnnnnnnnnnnnnnnnnnnnnnnnnnnnnnnnnnnnnnnnnnnnnnnnnnnnnnnnnnnnnnnnnnnnnnnnnnnnnnnnnnnnnnnnnnnnnnnnnnnnnnnnnnnnnnnnnnnnnnnnnnnnnnnnnnnnnnnnnnnnnnnnnnnnnnnnnnnnnnnnnnnnnnnnnnnnnnnnnnnnnnnnnnnnnnnnnnnnnnnnnnnnnnnnnnnnnnnnnnnnnnnnnnnnnnnnnnnnnnnnnnnnnnnnnnnnnnnnnnnnnnnnnnnnnnnnnnnnnnnnnnnnnnnnnnnnnnnnnnnnnnnnnnnnnnnnnnnnnnnnnnnnnnnnnnnnnnnnnnnnnnnnnnnnnnnnnnnnnnnnnnnnnnnnnnnnnnnnnnnnnnnnnnnnnnnnnnnnnnnnnnnnnnnnnnnnnnnnnnnnnnnnnnnnnnnnnnnnnnnnnnnnnnnnnnnnnnnnnnnnnnnnnnnnnnnnnnnnnnnnnnnnnnnnnnnnnnnnnnnnnnnnnnnnnnnnnnnnnnnnnnnnnnnnnnnnnnnnnnnnnnnnnnnnnnnnnnnnnnnnnnnnnnnnnnnnnnnnnnnnnnnnnnnnnnnnnnnnnnnnnnnnnnnnnnnnnnnnnnnnnnnnnnnnnnnnnnnnnnnnnnnnnnnnnnnnnnnnnnnnnnnnnnnnnnnnnnnnnnnnnnnnnnnnnnnnnnnnnnnnnnnnnnnnnnnnnnnnnnnnnnnnnnnnnnnnnnnnnnnnnnnnnnnnnnnnnnnnnnnnnnnnnnnnnnnnnnnnnnnnnnnnnnnnnnnnnnnnnnnnnnnnnnnnnnnnnnnnnnnnnnnnnnnnnnnnnnnnnnnnnnnnnnnnnnnnnnnnnnnnnnnnnnnnnnnnnnnnnnnnnnnnnnnnnnnnnnnnnnnnnnnnnnnnnnnnnnnnnnnnnnnnnnnnnnnnnnnnnnnnnnnnnnnnnnnnnnnnnnnnnnnnnnnnnnnnnnnnnnnnnnnnnnnnnnnnnnnnnnnnnnnnnnnnnnnnnnnnnnnnnnnnnnnnnnnnnnnnnnnnnnnnnnnnnnnnnnnnnnnnnnnnnnnnnnnnnnnnnnnnnnnnnnnnnnnnnnnnnnnnnnnnnnnnnnnnnnnnnnnnnnnnnnnnnnnnnnnnnnnnnnnnnnnnnnnnnnnnnnnnnnnnnnnnnnnnnnnnnnnnnnnnnnnnnnnnnnnnnnnnnnnnnnnnnnnnnnnnnnnnnnnnnnnnnnnnnnnnnnnnnnnnnnnnnnnnnnnnnnnnnnnnnnnnnnnnnnnnnnnnnnnnnnnnnnnnnnnnnnnnnnnnnnnnnnnnnnnnnnnnnnnnnnnnnnnnnnnnnnnnnnnnnnnnnnnnnnnnnnnnnnnnnnnnnnnnnnnnnnnnnnnnnnnnnnnnnnnnnnnnnnnnnnnnnnnnnnnnnnnnnnnnnnnnnnnnnnnnnnnnnnnnnnnnnnnnnnnnnnnnnnnnnnnnnnnnnnnnnnnnnnnnnnnnnnnnnnnnnnnnnnnnnnnnnnnnnnnnnnnnnnnnnnnnnnnnnnnnnnnnnnnnnnnnnnnnnnnnnnnnnnnnnnnnnnnnnnnnnnnnnnnnnnnnnnnnnnnnnnnnnnnnnnnnnnnnnnnnnnnnnnnnnnnnnnnnnnnnnnnnnnnnnnnnnnnnnnnnnnnnnnnnnnnnnnnnnnnnnnnnnnnnnnnnnnnnnnnnnnnnnnnnnnnnnnnnnnnnnnnnnnnnnnnnnnnnnnnnnnnnnnnnnnnnnnnnnnnnnnnnnnnnnnnnnnnnnnnnnnnnnnnnnnnnnnnnnnnnnnnnnnnnnnnnnnnnnnnnnnnnnnnnnnnnnnnnnnnnnnnnnnnnnnnnnnnnnnnnnnnnnnnnnnnnnnnnnnnnnnnnnnnnnnnnnnnnnnnnnnnnnnnnnnnnnnnnnnnnnnnnnnnnnnnnnnnnnnnnnnnnnnnnnnnnnnnnnnnnnnnnnnnnnnnnnnnnnnnnnnnnnnnnnnnnnnnnnnnnnnnnnnnnnnnnnnnnnnnnnnnnnnnnnnnnnnnnnnnnnnnnnnnnnnnnnnnnnnnnnnnnnnnnnnnnnnnnnnnnnnnnnnnnnnnnnnnnnnnnnnnnnnnnnnnnnnnnnnnnnnnnnnnnnnnnnnnnnnnnnnnnnnnnnnnnnnnnnnnnnnnnnnnnnnnnnnnnnnnnnnnnnnnnnnnnnnnnnnnnnnnnnnnnnnnnnnnnnnnnnnnnnnnnnnnnnnnnnnnnnnnnnnnnnnnnnnnnnnnnnnnnnnnnnnnnnnnnnnnnnnnnnnnnnnnnnnnnnnnnnnnnnnnnnnnnnnnnnnnnnnnnnnnnnnnnnnnnnnnnnnnnnnnnnnnnnnnnnnnnnnnnnnnnnnnnnnnnnnnnnnnnnnnnnnnnnnnnnnnnnnnnnnnnnnnnnnnnnnnnnnnnnnnnnnnnnnnnnnnnnnnnnnnnnnnnnnnnnnnnnnnnnnnnnnnnnnnnnnnnnnnnnnnnnnnnnnnnnnnnnnnnnnnnnnnnnnnnnnnnnnnnnnnnnnnnnnnnnnnnnnnnnnnnnnnnnnnnnnnnnnnnnnnnnnnnnnnnnnnnnnnnnnnnnnnnnnnnnnnnnnnnnnnnnnnnnnnnnnnnnnnnnnnnnnnnnnnnnnnnnnnnnnnnnnnnnnnnnnnnnnnnnnnnnnnnnnnnnnnnnnnnnnnnnnnnnnnnnnnnnnnnnnnnnnnnnnnnnnnnnnnnnnnnnnnnnnnnnnnnnnnnnnnnnnnnnnnnnnnnnnnnnnnnnnnnnnnnnnnnnnnnnnnnnnnnnnnnnnnnnnnnnnnnnnnnnnnnnnnnnnnnnnnnnnnnnnnnnnnnnnnnnnnnnnnnnnnnnnnnnnnnnnnnnnnnnnnnnnnnnnnnnnnnnnnnnnnnnnnnnnnnnnnnnnnnnnnnnnnnnnnnnnnnnnnnnnnnnnnnnnnnnnnnnnnnnnnnnnnnnnnnnnnnnnnnnnnnnnnnnnnnnnnnnnnnnnnnnnnnnnnnnnnnnnnnnnnnnnnnnnnnnnnnnnnnnnnnnnnnnnnnnnnnnnnnnnnnnnnnnnnnnnnnnnnnnnnnnnnnnnnnnnnnnnnnnnnnnnnnnnnnnnnnnnnnnnnnnnnnnnnnnnnnnnnnnnnnnnnnnnnnnnnnnnnnnnnnnnnnnnnnnnnnnnnnnnnnnnnnnnnnnnnnnnnnnnnnnnnnnnnnnnnnnnnnnnnnnnnnnnnnnnnnnnnnnnnnnnnnnnnnnnnnnnnnnnnnnnnnnnnnnnnnnnnnnnnnnnnnnnnnnnnnnnnnnnnnnnnnnnnnnnnnnnnnnnnnnnnnnnnnnnnnnnnnnnnnnnnnnnnnnnnnnnnnnnnnnnnnnnnnnnnnnnnnnnnnnnnnnnnnnnnnnnnnnnnnnnnnnnnnnnnnnnnnnnnnnnnnnnnnnnnnnnnnnnnnnnnnnnnnnnnnnnnnnnnnnnnnnnnnnnnnnnnnnnnnnnnnnnnnnnnnnnnnnnnnnnnnnnnnnnnnnnnnnnnnnnnnnnnnnnnnnnnnnnnnnnnnnnnnnnnnnnnnnnnnnnnnnnnnnnnnnnnnnnnnnnnnnnnnnnnnnnnnnnnnnnnnnnnnnnnnnnnnnnnnnnnnnnnnnnnnnnnnnnnnnnnnnnnnnnnnnnnnnnnnnnnnnnnnnnnnnnnnnnnnnnnnnnnnnnnnnnnnnnnnnnnnnnnnnnnnnnnnnnnnnnnnnnnnnnnnnnnnnnnnnnnnnnnnnnnnnnnnnnnnnnnnnnnnnnnnnnnnnnnnnnnnnnnnnnnnnnnnnnnnnnnnnnnnnnnnnnnnnnnnnnnnnnnnnnnnnnnnnnnnnnnnnnnnnnnnnnnnnnnnnnnnnnnnnnnnnnnnnnnnnnnnnnnnnnnnnnnnnnnnnnnnnnnnnnnnnnnnnnnnnnnnnnnnnnnnnnnnnnnnnnnnnnnnnnnnnnnnnnnnnnnnnnnnnnnnnnnnnnnnnnnnnnnnnnnnnnnnnnnnnnnnnnnnnnnnnnnnnnnnnnnnnnnnnnnnnnnnnnnnnnnnnnnnnnnnnnnnnnnnnnnnnnnnnnnnnnnnnnnnnnnnnnnnnnnnnnnnnnnnnnnnnnnnnnnnnnnnnnnnnnnnnnnnnnnnnnnnnnnnnnnnnnnnnnnnnnnnnnnnnnnnnnnnnnnnnnnnnnnnnnnnnnnnnnnnnnnnnnnnnnnnnnnnnnnnnnnnnnnnnnnnnnnnnnnnnnnnnnnnnnnnnnnnnnnnnnnnnnnnnnnnnnnnnnnnnnnnnnnnnnnnnnnnnnnnnnnnnnnnnnnnnnnnnnnnnnnnnnnnnnnnnnnnnnnnnnnnnnnnnnnnnnnnnnnnnnnnnnnnnnnnnnnnnnnnnnnnnnnnnnnnnnnnnnnnnnnnnnnnnnnnnnnnnnnnnnnnnnnnnnnnnnnnnnnnnnnnnnnnnnnnnnnnnnnnnnnnnnnnnnnnnnnnnnnnnnnnnnnnnnnnnnnnnnnnnnnnnnnnnnnnnnnnnnnnnnnnnnnnnnnnnnnnnnnnnnnnnnnnnnnnnnnnnnnnnnnnnnnnnnnnnnnnnnnnnnnnnnnnnnnnnnnnnnnnnnnnnnnnnnnnnnnnnnnnnnnnnnnnnnnnnnnnnnnnnnnnnnnnnnnnnnnnnnnnnnnnnnnnnnnnnnnnnnnnnnnnnnnnnnnnnnnnnnnnnnnnnnnnnnnnnnnnnnnnnnnnnnnnnnnnnnnnnnnnnnnnnnnnnnnnnnnnnnnnnnnnnnnnnnnnnnnnnnnnnnnnnnnnnnnnnnnnnnnnnnnnnnnnnnnnnnnnnnnnnnnnnnnnnnnnnnnnnnnnnnnnnnnnnnnnnnnnnnnnnnnnnnnnnnnnnnnnnnnnnnnnnnnnnnnnnnnnnnnnnnnnnnnnnnnnnnnnnnnnnnnnnnnnnnnnnnnnnnnnnnnnnnnnnnnnnnnnnnnnnnnnnnnnnnnnnnnnnnnnnnnnnnnnnnnnnnnnnnnnnnnnnnnnnnnnnnnnnnnnnnnnnnnnnnnnnnnnnnnnnnnnnnnnnnnnnnnnnnnnnnnnnnnnnnnnnnnnnnnnnnnnnnnnnnnnnnnnnnnnnnnnnnnnnnnnnnnnnnnnnnnnnnnnnnnnnnnnnnnnnnnnnnnnnnnnnnnnnnnnnnnnnnnnnnnnnnnnnnnnnnnnnnnnnnnnnnnnnnnnnnnnnnnnnnnnnnnnnnnnnnnnnnnnnnnnnnnnnnnnnnnnnnnnnnnnnnnnnnnnnnnnnnnnnnnnnnnnnnnnnnnnnnnnnnnnnnnnnnnnnnnnnnnnnnnnnnnnnnnnnnnnnnnnnnnnnnnnnnnnnnnnnnnnnnnnnnnnnnnnnnnnnnnnnnnnnnnnnnnnnnnnnnnnnnnnnnnnnnnnnnnnnnnnnnnnnnnnnnnnnnnnnnnnnnnnnnnnnnnnnnnnnnnnnnnnnnnnnnnnnnnnnnnnnnnnnnnnnnnnnnnnnnnnnnnnnnnnnnnnnnnnnnnnnnnnnnnnnnnnnnnnnnnnnnnnnnnnnnnnnnnnnnnnnnnnnnnnnnnnnnnnnnnnnnnnnnnnnnnnnnnnnnnnnnnnnnnnnnnnnnnnnnnnnnnnnnnnnnnnnnnnnnnnnnnnnnnnnnnnnnnnnnnnnnnnnnnnnnnnnnnnnnnnnnnnnnnnnnnnnnnnnnnnnnnnnnnnnnnnnnnnnnnnnnnnnnnnnnnnnnnnnnnnnnnnnnnnnnnnnnnnnnnnnnnnnnnnnnnnnnnnnnnnnnnnnnnnnnnnnnnnnnnnnnnnnnnnnnnnnnnnnnnnnnnnnnnnnnnnnnnnnnnnnnnnnnnnnnnnnnnnnnnnnnnnnnnnnnnnnnnnnnnnnnnnnnnnnnnnnnnnnnnnnnnnnnnnnnnnnnnnnnnnnnnnnnnnnnnnnnnnnnnnnnnnnnnnnnnnnnnnnnnnnnnnnnnnnnnnnnnnnnnnnnnnnnnnnnnnnnnnnnnnnnnnnnnnnnnnnnnnnnnnnnnnnnnnnnnnnnnnnnnnnnnnnnnnnnnnnnnnnnnnnnnnnnnnnnnnnnnnnnnnnnnnnnnnnnnnnnnnnnnnnnnnnnnnnnnnnnnnnnnnnnnnnnnnnnnnnnnnnnnnnnnnnnnnnnnnnnnnnnnnnnnnnnnnnnnnnnnnnnnnnnnnnnnnnnnnnnnnnnnnnnnnnnnnnnnnnnnnnnnnnnnnnnnnnnnnnnnnnnnnnnnnnnnnnnnnnnnnnnnnnnnnnnnnnnnnnnnnnnnnnnnnnnnnnnnnnnnnnnnnnnnnnnnnnnnnnnnnnnnnnnnnnnnnnnnnnnnnnnnnnnnnnnnnnnnnnnnnnnnnnnnnnnnnnnnnnnnnnnnnnnnnnnnnnnnnnnnnnnnnnnnnnnnnnnnnnnnnnnnnnnnnnnnnnnnnnnnnnnnnnnnnnnnnnnnnnnnnnnnnnnnnnnnnnnnnnnnnnnnnnnnnnnnnnnnnnnnnnnnnnnnnnnnnnnnnnnnnnnnnnnnnnnnnnnnnnnnnnnnnnnnnnnnnnnnnnnnnnnnnnnnnnnnnnnnnnnnnnnnnnnnnnnnnnnnnnnnnnnnnnnnnnnnnnnnnnnnnnnnnnnnnnnnnnnnnnnnnnnnnnnnnnnnnnnnnnnnnnnnnnnnnnnnnnnnnnnnnnnnnnnnnnnnnnnnnnnnnnnnnnnnnnnnnnnnnnnnnnnnnnnnnnnnnnnnnnnnnnnnnnnnnnnnnnnnnnnnnnnnnnnnnnnnnnnnnnnnnnnnnnnnnnnnnnnnnnnnnnnnnnnnnnnnnnnnnnnnnnnnnnnnnnnnnnnnnnnnnnnnnnnnnnnnnnnnnnnnnnnnnnnnnnnnnnnnnnnnnnnnnnnnnnnnnnnnnnnnnnnnnnnnnnnnnnnnnnnnnnnnnnnnnnnnnnnnnnnnnnnnnnnnnnnnnnnnnnnnnnnnnnnnnnnnnnnnnnnnnnnnnnnnnnnnnnnnnnnnnnnnnnnnnnnnnnnnnnnnnnnnnnnnnnnnnnnnnnnnnaaggccaaagccttgtcaaggcgagaagtcaagcgtatttggagtggagcatcgggctcctactctccggtaaaagggcggtgtgctacagcgcaaggtggatgactgcccgcatcgatagggtttcactctccggtaaaagggcggtgtgctacagcgcggagaagcatgcgctcgacacgccgcgagtttcactctccggtaaaagggcggtgtgctacagctcggcgggtacgccagagccgcgtcagcgagtttcactctccggtaaaagggcggtgtgctacagcgctaaggacgagccagccgagtggtatctgtttcactctccggtaaaagggcggtgtgctacagcagagcaacgtcgcggtcgtgcacgtgagcgtttcactctccggtaaaagggcggtgtgctacagcgcggtgtgcaacgtgccgcggctgttcgtcgtttcactctccggtaaaagggcggtgtgctacagcagagcgaggctgactgagttcggggaagcagccgaaatttgaggttgcctggcctcttttgattgtcggagagtgaaaaaagctcagccaagggagaccccgcgggaaaccgtcaggggccaccgttaggaggcaagtttggggaataggtaggggtaaccctaagtgcaacctggggtgcgccttcagctccaggctctgcagggtccggcccagaggactaacgccctaacgtgaagtcgagggagagattaaggtggtcgtgaggccacaaggcaagctggaccatattcctatccctaaacctgagcgaggaggcattacaattcggtccgagaacgtgctgggaattgacttcgggccggagcacgtggggctggccttggtgcggcgggagccggccggggagcaggtgctctacgcggcttccatcaccttgcgcgacctgtccccggtgatgaaggagcgccgcgctctcaggcggcagcggcgctctgagtcatggtaccgccagcccagggtcccacagcggggcgggggcagcgcgcggggagccggggcccaggaagatgagcaggccgtcgagggtgtgccggaagaggaggaggatcgaagtcgtgcgcggtccgctcccgagtaccggcgggcgcagggatgcaataagcccaagcgaaagtgcaagtatgttgaccctaagaccggcgaggtctgcggggccaacacccctcgcaaggagaaggttcgcgatctgctgctgtgggacatctgccagcacctgccggtggaacccgagcagcgccttgccatcctcagctacgtcaatcaggtcaatattgtccgcccggaagtgctggcgtgccttgccctggaagagcgggccttgctggaaaaccatcgagctctggcccgcgcttcgaagagcaagcctctcccccagcttctctgcgaactgaagatcaagaaacagttacaatcccagattctggcgatcgccagcggagaccccgaacgcaaagccgccgacctcaaggggcggatgcccttctgccgcaagcattttctccttcaccacgaacagaccaggattcccaagccctccgcctggcttccgcccagtatccggtgtcggcacgccgacctggagagggtctgccgggaggaggtcgccccccgctggccggtccaccggatcaggctggagcgggcgcagttcgacctgcaggccattcagcgagatccccaggggcggggtaaggactgggaccccgaggagtggcagcgaggtccttgttggggccggcgtaatatctactcggcgaagcggcatgagcagggtaatcgctgcgcctattgcggaaaaaaccccaagaaagagaaccgattagagctcgagcacgttaaaccgggtggcggcaatacttgggataacctggtgctggcctgccgtaagtgcaaccaacgcaaagggaaggctgacgccccgggtgccggtcttgagttttccgttgaccccgataccggagtgagtctggctcccaggggattgggagagtccgtggtggcccggtacatgacccagaccgaccagggataccgggagctggtggcccgcctgcagcaattgttccccgacgcccagatcgagtaccgctacggctatcagacggatcatattcgtaaacggtggatcggctcggcccagtttgcggagaccgctttgtcactcggctacaaacagtcgccgccgcggccgaagaaacgccgaaagcagtggaccgaattggcgcatctgaagcgcaaacccaggcgacacagcgatcccctcaaaagtcatgtgatggacgcggtcgccatcgctagtgccctagagctcgactctccgccgcagctttgcccggcggagaagattatccttcgcccttctcgacgccagctcttcgacaccaaccccctccagcgcggaagtgacgacaagttttaccagcgggtgaagatttgcggcacccagggcgggctggccttcgacaagctgaagcacgtggttgatgacagcaagcgggcgattctggagcgagtgcgcgaccggctgatcgagcaggctaaggtgatcgagcagcctaagggcaacaaagaatccccgcccagcgccttcaccccggatgctgcccagctgatccccttcacgtctgttcgcttggccaaacgagacgcctccaagaccaacacccggaggttaaagggcgggcactggtacaaggttgccggtgggcccaattgggccaccgtcgtctatcggcttggcgtccgtgaacaggtaatcgtgattcgcaacccagcagtgttccccgacgattcagcggaactgccgaaaggcgctcaggtgctcttttccttccgaaagggagagttggtttcctttgagcaggatgggcaaacaacgcgcgcccgaatcaccaagaacaacagcaacggcactctaaccgtcgaacgcctcgacgacggccgggaagtgacccggtcagctcgctgctttcgccccgtccccctgctagcgcccaacgcctgacgccttgtctgagcacccgccagtgcccctcgcacagctccctccaactgcgcccgcagcatctcctcccgccgggaactcgttgtgctgtaactcccaagggtgaacgatgttgtaacagcaagagtgaacggtccagatcgcttgagcaggtgcagcattggcagggctacgccaggaagtgacggtgatcgagcggtttcggatcgtgcaggcggcacactgctccccgatgccagccgggggcggcgagtgtgccaccacgaggccttactgaaaagaatttcaattgccctgcgcttattgcatttttgccccccttttgttaaattagagggggggagccgggcccttattgcacgtatttcacatagctttcggaggttcgagccatcatgacctcagcagaggcaccgtttccgcttgccaggcgaggggggacgtacgtccgccagccgaccggctatcgggctttcatccccaagccgctgccacctgatccgccgctgaacatggatgcggaactgctgaatcggctgtccgccgccgatcaggctctgggccggctggatggcacggccacgctcctgcctgatccggatcggttcgtgtacacctacatccgtaaggaggcagtgctaagttcccaaatcgaggggacgcaggcgtccctggtggatgtcctcgaatatgaggcaagtgcgcccccgcggcggccgctgggcgatgcggcggaagtggtgaactacgttgtcgcaatgaattatggtctggagcggctgcgtgaccttccgctatccctgcgtctgatccgcgagattcatgcacgcctgctagaaggtgtgcgcggcagcgagtggacgccaggagagtttcgccgctcacagaactgggttggggcgcctggggggctgctcgccgacgctgcctacatcccgccccccgttcacgaaatgaacaaggcgctgggtgacctggaactcttcttgcacgacgagaccccagtcccaccgctggtgaaatgcgcccttgtccacagccagtttgaaaccattcaccccttccttgacggaaacggccggatgggccggcttctcatgactttcctgctatgccaacaagggattctctccaagcctctcctttatctcagctatcacttcaagcggcgacgggcggactactacgagcggctgcaagccgttagggatgaaggtgattgggaaggctgggtgaggttcttcctgcagggggtggcggaggtatccgcccaagcgacggataccgccaggcgaatcttggccttgcacgaacagcaccgcggcctcatccaggcgcgaatgagaacggccaatgcgttgcgcctgttggagcttctccttaagcaccccgttatttcgattacggaggccgccagtagcctggagctgacctatggtggcgtgaagcgcctcatgtccgaactcggaaagctagggttgcttacggagataaccggcagcgagcggttccgcctctatgcctacgagccctacctcgccattctcagcgaaggcaccgagccggagtcctccgcctcgcctggcgcccggtgacccggcgggcggcgcgcgcccctgtatcccgccctgcggcgcgaggcaggctgatttcggcccccgggggaaagcgctaatccccctacggcgccgcctcctccatcaccgcgatgtgcgcgccgcgggtgatgccgaaggggacgaagctgtagcggtcgcgccacacgtcgtcggcgctgcgcgggtcctcgcgccactgctcgccgccgaggaa

SEQ ID NO: 91 - DNA, 15259 bp, Artificial Sequence
  Synthetic
cacccaggtgaccagcaccagcatcagcgccaggcccaggccgaccaggagggccctccgattctgccagatccgcttcatgccgtcagggactgcggtcagggccgtctcagtggctcccgtacagcgtctcttgcatcatcgtctgtcaccatgatgcaagagacgctgtaatgcaagacccccctagttgcttccatagtttgccgagggcaaccttttcaaccggactggtttgtgtgcctccccggcgcgagcagaccgggcgagaccgccccccggccgccgcccctccccggcagagcgaggccgggagcgggcccctctcccgggccctggccggcccggtcgggcgagccggtgggccggagaaatcgggtcccgggcccttgactctggtgggctggtgtgctagaatcgcccggtttggtaacagtggcgtcggaggtggagctcacggcggacggttccacaactgcgtagcccctgttggcgctaggcgacacggcctcccgcaacatcactgcaatcatcccaggcttggcctctcccgcccacgaggggcgcctgtcccagaggcagcgactcaaagtggtgccgccggccgaggatgggacccgcgagacggacaactggtcgagcgtcgtgaagcgcagggcctgaattcagttcatctgtcatctcttgtgacagcttcacggcgactcgggccaaccgtccggtggacgaggtccgaccccggcccggccggtggagttcgctgactctgttcgcggcaggcggcgcggacgcggaggggaggtgatcactcgaggtgcttcccgtgttgggcccaggcgcgcgcccagcctcggcgcgcccccgggagctgagtagggatcttgctgttgatgtgcgaccctgtcaaggaggcgaggcatgaagaagtgggcagtaccactgttggtctgtttcgggctggcgttacttgccgggacgccgctcttcgcgaccgacgtggccttctggaccgagaccctggacgggcctgctgccccgacggggtggacggcactcggggactggcagttcggaaagccgaccggcgtcactggggaccccaagactggccataccggcaacaacgtgtatggctacaacctcactggtccctacggcccgaacatcgcgccgccccgctatctgaccactacggcgatcaagtgcaccggcaagtacgcagtgaagctccagttctggcggtggttggttgtccaggacgcggactacgaccaggccaacctccaggtgtccaacaacaacaccacctggaccaacgtctgggtcaacagcaaggacgcggatcacgtggacacctcctggacgctggtcacctacgacatctccagcgtcgccgacaacaaggccaccgtctacctccgctgggggatggcctctcagtcgaacaagccctacacctacggcgggtggaacattgacgatctctccctgttggccgctggaccgaccgcgatctactcctggaacctgaccggggcggagcccgcgggctgggtgcgtgacccgcacgccccggcgaacgcgcagcccccggccgctggtcctggctggcagttcggaccggccgcggtgggcaccagcggtcagaacataggcaccccgccggtgctcaccggcgctgacccggccgcggacgccgacggcgtggccggcgggaatgtctacggctaccggattggcgccaactactacaagggcatgagccgaaccgagtacctcacctcccccaagctggactgcacggggcacaccggtacggaggtgcggttcatgcgctggttggcggtcgaggacgccgcctgggatcgcgcctgcatccaggccaccaataacaacgcccaggtcaccatcttcaaggacgacttcgaggccgccaccatcaccggctggaccttcagcgggctgcccgccaccggccccaccatctggaccggagccgggaaccggaacgacaagcagagcgtgaagttcgtgcagcagcagaagatggcacgaaccatcgacctcaccgactactacgcccccctcagcttgacgttctggatggccgccgacaagctcgaggccggcgacaaggtggtggcggagtactcgctcgatggcggcaccacttggcctgacatggtgacactcacggccaacaccgccttcgcgcagtacaccgttgacctggcggcgctcagcccactggtcgagaacaaggccaacttcatggtgcgctttgggatcgagggcaccgcgcccgacaccgatgttgacgaggcctacctggacgacgtggtggtcaagggtgtcaagtgggtcacccggtggtccaacccgaagggcccggtgggctctccggttgacatcttcgacaccaagtggacccaggtgagcgtccccataggcgcggtggccgacggcgaggatgccgtctacatccgcttcggcatgggcccgtcagacgccttcgcgatggccacggagttcggtgggtggagcctcgacaacatccagatcgtcgagggctcccgcgactgggaagtcgcctccaccagcgcgccgcgagccctcctctgggaaaccagcgggacagtgccagttgccgtgggcgcgaggaacgacggcaccgccacctggacctcggactacaagctggtcgaggtgatcgggccgaccgagccggtgaaccgctggaacatcgtgagcaaggcggtgaccggcaccgtggcccctggcgcgacctttaacttcagcgccgccgccctggctccgcccctcacctccatccagtacaagaccccttggcacgtcacctggccggctgacgcggagaagagcaagctcgagtgcaacttcaacatggccaactccgccggcttcttcctgagccggacgttgacgggcgagatcatctacgccaagaacggcgtggtcactcgccgcttccccgacattctccccgggaccgacggcgcctgggccgacttctacactgaggaactcctgggccgcgtcccctacatcgtgatgggcttcccgagcccgatctacccgaacggggtctacggcccgctggtcgtagtgcagcgcgacgccatcgcggtctacatccagcgcgccgcgaacatcccgaaggcggcttaccaggggctgttccgcgatgtgccgtctggcttctgggccgccttggagatcgaggcctgcgccagctccacgccggccatcgtccaggggtacccggacttcacctatcggccgacggacatcatcccccgagacgcgatggcgaagctgatcacgctgggcgtcatcgtgtctggcaacgggctgatcgtcaccgtgccgccgtatcccaccacgcagccgttctcggatgtgtacgtggttgacgatccgaccaagaccccgccgatcgtcaagaacccgttcgccgcctacatcctggccttgaagaacgcggcggtcgtggagggctatccggatggcacctaccggccgagcgtgaccatcacccgcgacttgctcgccgcctacgtctggcgggcgttcatccgcaacccggccaccgcggtggtgctgggcggcccggcggtgaccaagatcaacccgaatcccgcggtcacctcctgggtcggctatccgagcaccgctatggcgcagggtgaggaccagaactacgcctacgcggtgttcgacgccgcccgcatgggcgcggcgatgctgatgaacggcacctgggacgtgaagttcgagctgcgcaacctgaccaccccgacggtcccggctccggccggccgcacgggcctggtgaaggtgcccacggcgaccttcaacgcggcgatcgcaactgcgcgggcgactggtgatccctacttcaccacctactggccaatcccgactggcctccagggtcggttcgtcctggtaaccagtgtgggcaatgtctccggcaccatgactgaggcgctgcgcaagcctgcctacaccgtggtgaaccggatcttctacgacgacttcgaggccggcattgatcccagctaccaggtgctgggtctgccctctggcggcccgctctggtgggacaaggatcccaagaacggcacccactccctggagttcaccggaacccagaagctcgccaggtcagttgacaccaccggcttctacaacctcagcctcgtcgtctggctgggcggcaccaagcttacgagcaccgaccacctcgtggttgagtggtccaaggacgcaggcctcacctggaccaccgccgtggacctcaccaaccacgcagggccggacaccaagctcaccaagtacacggctgccctgccggcagcggctgagaacaacccgaacttccgcctgaggttcggcatggacgccggcaccgacgtgaccaagaagggctacgtggacgatctggagatccggggtagctagagctggccgcccgagcggacagctcggctagctggctcacggactggaccgtagcggaccggcccggcgctcgccgggccggtccgcgctcctcccgcagagcggggagaagcgatccctcgctgggaggtcgagagagcgctgagctggctgcgtgagccgcgttgctctgccccggcgagaaatggaatagatgacgggggccatcgagcggcccccggggtctggtacaggttcgggcctgggccgggcgcgcccctctcgctccgagctggcgggcgcggccggggagccctgcgggcgccagccatgcgcgcctgtgccatccgctcaaggaggcgcggtatgccgagaacgaagcacttgtgcgtcacagcgctggtggccttgtgtatgagcgtgaccgccagcgcagtgctcgcggcggacagttggaaggtgctcggcagcgagttccccatccaggtcgagtgggatgagtcggccaatgtctgggttgacacgcagaacaccggcaccaccacctgggactccagctacgggctcctctctgtcaccggggtcacggtctcagccattcccactgatcgctgggggctgaagctggtccccatcgtgggcatcacggtggcgccgatggcgacccacaagttcgagttcgcggtcttggcgccgccgttcaccaccctgaagtacttgcccccggtgacgcccaccgagtccggcgtgggggactatctggacgccaacttcatcctggcccacccggtcactcccaccccgaccctggtcaccaccgacaccgcgctcaaccaggcggtgatcagccgcttcccggacatccagcccgggaccctgggatactgggcccgctttgaggtggaggagctctccggcagagctccctacgtggtcctcgggttcctcgatggaacctacggaccccgcctcccggtccagcgcgatgccatggccgtcttcatgtgccgcactctgaagctgccaacggggccctaccagggcaagttccgcgacatcgcctccaacttctgggcctgcaaggagatcgaggccctggccagcaccgacattgtggaggggttcccggacgggacctacgggccgtacctggtggtggaccggggtacgatggcggtgttcgtggcccgcggcatggttggcggcgagtcgctggtgccgcccgggccgctccagcccagcttccctgacgtgccccccgtcttctgggcctacgaccacatcgagtatgcggtgagcgaggatgtagtcaagggctatctggacggcacctacaggccgctcactgccgtggagcgcgaccagatggcggtcttcctctggcgcgccttcatcatgccgaccggcgtcccagtggcgctggccggcccggacaccacctcggcgggcgacccggccaccttgccctacctcggctggtcctccgatgggcaggaccctgacttcgcctacgtggccttcgatgccgttcggctggacaccaacctcgtcttccccaagacccccagcggcacctgggatgtcaccttcgagctccgccccggggatagccccaccgccgcagccagccacaccatctccttctacgcggccgacatcaccaaggccaggaacgcggcgatgaccacgggtgacccctacctggtgctctcctgggatctgcgccccctctctctgcctgcgggcacctatcacctggtggtgatggccggagatgagaagggcgtgatgcgactggtccccatgtcaggcacccgtcaagggcatgtgagcttcagctagtgtgccgtctcagaagtgcggttacagtatgaagtgcaatccccaagctgctccgagacggcacacgggcgctcacggctccgacggctgcccacgatccgcgcggcagatatgcaggggtgcagcctcactctaaaggtatttcggcgacagcgcactagtctggcgcatggcaggctgctggcgtggcgcagcgccggtgaccggccggtgacgctgatgcgctgagggagcagccaaccccagcgccacggaaatcagggcgcccgcttccaccgcgggcgccctgccattccctgcgggaggagcggacccggcagaagcgaacaggccaccccatgagcggcgggccggccatccccatcctgctctaccacaagatcggcgccccgccccgcggcgcccgcctcccgggccagtatgtctccccggccctcttccgccgccacctcgactacttgcagcggcacggctatcgcgccatctcgctgctcgacatcgtccaccaggaccgcgacctcccgcgccggccggtggtgatcaccttcgacgatggctaccagtgtcttcaccgtcacgcctttcccgcgctggcccagcgaggctggaccgccaccatcttcctggtggcgggggcgctcggaggtgtcagtgtgtgggagcgagccgccggcggtgctgccgagcccttgctcggtattccggagatcagggagatgcgaagcgcggggctggagttcggctcccacaccctgacccacccgcgcctgaccgcgctcaccgaggcggaggcggcgcgcgagatcggcgcctcgcgatctagcctggccgaggccctgggcgagccgtgtcgctccttcgcctacccctacggtgactgggaccaccgggtgcgcgatctggtggcgagcgcgggctacgaggcggcctgtaccacggtgcggctggcggcccgccgagaggacgatcccttctccctcccgcgcatcaatattcgccgctacaacctcgtgccgcggttcggctacaagctctggcgggcccaacgagcccgggcgtgatggagcccctgcgcctcctccagtacatcaccccctcccagatcggcggggcggaggtgcacgtcgccaccctcgcggaaaagctgcgcgagcgcggccacgacgtgaccgtgatctgccctcgtgggcggcccctggtccccgagctggtggccagggggctgccggtgcgcgcgccccgcagcactggcaagctcgatcccgtgaccctgggccgcctctcctactggctgcggcgagaccgcatccaggtgatccacacccacctgtctaccgccagcttgctcggcagcctggctggtcgcctggcaggcgtgccctcgcttgccactgtccacggcctcaacacccgcacctgcttcaactactcccgtgccatcatcgcggtctcgaacgcggtcaagcagcacctggtcgcgcaggggatgcccgccgacctgatcaccgtggtccacaacggcgttgatctgcgcgccctctcccggccggacgccagcgcctcggtgcgcgctgagtgggggctaccggagggcgcgccgctgctgatcacggtgggccgcctggtccccaccaaggggcaccgcgatctcctccaggccctctccattctggcgagagacccccgctggcaggagctgcggctgctcgtcgtcggcgccgggcccctgctgctccccctccagcgggaggccgagcagatgaacctggccgggagggcggtgttctgtggcttccgccgggacgtcccgcctttcctccaggcggccgacatcttcgtgcttccctcggtccaggagggcctgtccctgtccgctctggaggcgatggccctgggcaagccagtggttgcttgccgcgtcggtgggaccacggaggtggtggtggatggagagaccgggctgctggtggccccgggccggccggccgagttagcccgcgctctggagcggctgctcgcccatcccgaggaagcgcgggcaatgggggcggcgggccgccgccgcgcccagcaggccttcgacctggagcagatggtcaccaagatcgaggccatctaccaccggctcacctctcgctcactcatgtgatcctgagtcagccgcaggcacacgaaagctcccgcccttggttgtgagttgggcagcttccttgacgcccgacctccgcggcggctatactcgaccgggtgggagcgcagcgtccacagagggcttgcccacctcacggagggctggcccgcccttggaggggtgtccgagctggcctaaggagcgcgactggaaatcgcgcagggggccagaagctccctcgcgggttcgaatcccgccccctccgccgcgcctatggccgcggtagcacctccggcccgtaacacgtcccctttcccgccctggccaccgtgcaggcctggcagtggggcttgaaatgcgcctgtagtgtgctataatacgctcgcccgcaaagcaagggatcgtgctgtgctccgcgctgagaagccccagtgccttgcgggagggggaggccatggcgcggcaggccgccgtcgaatctcagtcgctgcggccgcaagtgcgccgctcccgctgtgtcggttagtcagtctgggctgacacttccgtgtcggccccgagcaccttgacaactcgggagggcgacagagccgccagcgccgggcgcgaaccgccagcattcaaaccgaggtttgctgtttcgccctcgcgctggtggacacggtgggcttgtcacgcatgacgataagggtatagtcgtttcgccctcgcgctggtggacacggtggatggatgaactctaccgactcacgactgctgagtttcgccctcgcgctggtggacacggtgctgctatcccgtcgcccatgtcggccgttgtcgtttcgccctcgcgctggtggacacggtgggatgcgaaccccgcccagcttcgccccttgcgtttcgccctcgcgctggtggacacggcgtctgacctgcggacgcagatttacgatcagtagtttcgccctcgcgctggtggacacggctgctgccccttgacccacttggcgaccgtggcagtttcgccctcgcgctggtggacacggcgcgccttgcggcgggcgggattcagattggagggtttcgccctcgcgctggtggacacggtggagggagctggggcgggcccagagcccagagagtttcgccctcgcgctggtggacagggcggcgcggaggtcagcggcgagagtcgccggtcagcgcgagagaggcgacctgcggacgcaatgatgaccagcgctgaagggcgaaaacagcccagccaagactcgccgcggacaggcctggtagcacaggactgagccggtgtggcgagcgcgggaaaccggcggggaaactcggccggctaccgtcaggaggcacgtttggggaacaggtaggggcaaccctgagtgcaacctggggtgcaccttcagctccaggctctgcaaggctcggcccagagggactaacgccctaatccgcttctggcggcttgtccgcctccggcggaaagggagagaaaggcggtcgtgaggccgcaaggcaagccgagccatatccctgtcctcaaacttgggcgggaaggacaacttgtgagtacgagtgcaggcgagtgtgtgctcggcctggacttcgggccgaagcacgctgggctcgcggtggtcctgcggggtccctcggccgacgaagtggtgttcgccggggaggtgcgtttgcgcgccctgaaggccttacgctctgaccggaaaaccccactctccgagcggaagaccatactcggcgtccggcgggccttgcgccgcagtcgccgcagccgcaagcgctaccgccagccgaagattccccagcgcggcggcggggccaccacagataccccggagaacaccagtgccgccaggggccgccctcccgagtaccgtcgcgccaccggcctcaacacaggccgaagacgctgcaagttcacggaccccaccaccggcgaagtctgcgccgtgaacaccccccgcaagaccaacgtgcgcgacctgctgctctggaacatctgccgtcaccttcccgtgtctcttgcagagcgcgccgcctttgtgtcctacgtcaaccagcgcaacctccaacagggtgaagtgctggacgcgcttccggcagcggaccaggccgcgcttcaggccgtctttgctcagcagcgcaagcccaagcaggaaccccttgccgcgcgaatgcgtcgcctgggagttgaccgccacctgcgctcacagatcacggacattgtgggcactacctcacgccggcccctcagcggcaggctctcgttctgtcggcagcacttcctccgccaccacgagcagacccgagtagcccgtccgagcgtgtggcttcctactaccatagagatgaagcacgcggatgtcctccgcgtgtgcggccaagagatcgcgcccaggtggcaggtgcgccgaatcgtgctggagcgcgcgggcttcgaccttcagctcctgcggcagcaagtatccttggagtggagagtggaggactggcagcgagggccccgctggggctaccggaataccttcgaggcgaagaagcaggaccaaggcaaccgctgcgcctactgcgggaagaagccgtcacgcgagaaccgatttgagctggagcatgtggcccctggcggcggcgattcctgggagaacctggtgctcagttgccgcgcctgcaaccagcgcaaagggagtcgaagtcccgccgaggccggaatgctcttctgggcggacaccgaaaccggagagaccctggccccgctatctctcggcctgtcacgcgtggcccgctacatgacccagactgaccagggctggcgcaggctggaggcttcgctgcggaggctgttcccaggtgcagaggtggagtacacttgggggtatcagactagcttctaccgcaaccgctggggcctgcccaagaagcactacgctgacgccgcggtcattgccagctctcaccaactggagcgcaagctcgcgcttcccgagcagccgaagcgcttcgcgcccgcgccaggcggcaagcggctcttcgacacgaacccgctcgcgcgcgaacccgacggccacttcacccagcggcagaagctggtgagcgagcagggagggctgacgttcgccgaagtcccacgcgtggagaacccgcggaagcggaagctactccaggccgcagccgacaaggcaatagccgaggccgccgccaaaggagagaagccgccggcggcgttcactgcggcgatgcttgctggccttccgttcaactcagtccgcctcaccaagcccgacgcgcaggagcgcaatacccgacagctagggcagcagtggttcaaagtcgcggggggccccaacgtcgccaccatcctctacgaacacaacggcaaccaggccaccctcgtcaaacggaaccccgctatcttccgcgctgacccaggcctgcccagaggggcgcgcgttcttgcggtctaccgcaaaggtgacttcgtggagtgcagcgacggcctgggccgggtgacgaagaaccacagcaacggcactctaactgtcgaactggtggatacaggaaaggcggtgacgcggcaggccaagtcgttccggccggcgcgcaagccgccgcgaggatagcaaagagtccgtagggccggagcggccacccttttcccccgtggggaagctaccaaagcggcccaaccacccctcctatgcgaggcgggccctgcaggcagagaggaggcaacggcgatgaaggccgaccagtcggggttcatccccggaagcgacatcatattctgggttggcgggaccgaagggtacgaagggttgcgcctctgcccgcgcgacggacgcatcctagtccgtggtaaggaggtggccagagacgaggaggtcgtccgcgcagtggccgacgaactgcgacggctggccggcgcgctttgagtctttcgttgcggcgtccttgccacctcgtcggggccctcggacccctctacgccatcccctccaacctcttctccgtcacctccccccgcagtggttccccggcgaagaagcggcgaaggtcctccaccgcgaaggcggccatctcccagtagcggctcggcaccggaccgcccacgtgcggggtgagcagcacgttgggcaagttgcgcagcgggttgtcggccgcgggcggctcgggagctgtgacatccagcccggcccacagccggccacttctcagctcctcgatcagcgcctcctcatccaccagcgcgccgcgcgccgcgttcacgatcaccgagccatccgggatcagcttcagccgctctcggctgatcatgccgatggtgtcggaccgcaccgccgcgaagaggcagatgatcggacaattgcgcagcagatcctccagctccaccagcttgatcccctcggcggcggcccgcccgcggtcgccgtgcttgctgtaggcccacagctcgcacccgaagggccggatcatccgcacgaactcccaggcgatcatcccgagcccgaccattccgacccgctgctcgatcaacgtctcggggttgaggtcactgtacgtcccccaccagagatcagagcctttcatctcctcgcgaaatcgcgagatgcgccgcaggcaggagatggccaggcacagggtcagctcggccacatagcgagacatcatcggcgtggcgcagctcatcgtcaggccgcggcggaagaactcccgcgccggatcggggagaaggaagtggacgcttcccgcggcgtgggacacgatgcgcagccgcggcgccgcgtcgagcacctcgacgctgagttgcggcgagccccagccggtgatcagcccctcgcagtcccccaggtgcgcgctcagctcctgctgtgtgagccgcccctccttgcggttgtagaccggctcggcgaaagcgaccagcgcctcccgcaccttgccggggaagagctggtcctggagctttccgcctggcgccacgaacactctcggcctggtcactgcccgctgcctccgggatgggatgggggatgccggactcacctggtcccgagcgcggcctccgggacgaggccgcgccaagctctcagttctcgctgccgtcgcttctgctgctgctcttcccggcgcttgctcaaccaggtttcaaacgcttccctggtgtcgaagtggaggctgtgctccgaccgctccgggtactcgcaggagccgtagtcgtactcccgacagacctccggccggctctcataggtcaggcacaagttgtcactggtcaggtacttgcagggcgtgtggacctccaggtgccagcgccgcccctccacgtagacgctggtgctctcgtgcgcgaggaaccagctcacctcgtcgaagtcccatttccgcctgggcggcggaagcaccacggtgatgtagcggcagcagcggctcccgcactcgtatcggcacacccggtccgcctccgagatggtgtggttggcgctcatcttccgccccctggcctcgcgctcaagacggccttggtttcgtcatgctgcgccagatgcctgttcccgaagcacctgaccgcggccccgctggcgggcctagtgtgccgtctcagaagtgccgttgcagtatgaagtgcgatccccaagctgctccgagacggcacacgggcgctcacggctccgacggctgcccggaatccgcgcggcagatacgcaggggcgcaccgtcactgtagaagtatctgggcgacagcacaccagtgtgccatctcagaatcccccggttttgtggaatgaggcctttgccgttgacaagcgaataggcgacgacacggcagatgcgctaggctctgggtctacagcttccgccccggtctcccccagatgggcagagacgccggcggaggcaatcaccaggctgccgaagatgccaagctcgtgaggagccatgggggctcctgcgggcgggacctctccggcagcctgtttcttttgagcggtcgccagcgagaaccgaataagccactaccggaaaggaggtagagtgttgcggacactgcactggtcgcatggggagcttcccccgccccgcgcactgcccgcgcgaccagtgcgccatgtcccaccgctggaaccttgcctgttccctggtcgcccgaggcgctccgacactgaccctcctgtgctcgccagggccgcccggcccgacgagccgcccctgcgggcgacccacaactgaactcccgcggtgccaggggcttctccggccgccaaccgcccctcaccagcgggcgatgtctaacacggcgcaactccctcccgcgccatgtctggcccggcgtccgtccccggcgccgggccagatccttgtgttccgggcatgtgcccgttcccggaagtgagggtcctctaacgaatgtcgcccaaagaagtaatgggcgacattcgtcagaaagctacagagtctcgtgaatcatggtgagagaccatgattcaagagactccccaggagagcgtctggcgcccttctgagagattctcttgcatcaggggtcttatcctgatgcaagagaatctgtagagcgcatttcataaccctcaatcgcctggctggcccgcacctgtgctggcgtgaaatgcgcccacgcaagcctgccgcccttgctgggctgtttcatgacctctttcggaggttatgaaacagcctctacagagtctcttgaatcatggtgagagaccatgattcaagagactccccaggagagcgtctggcgcccttctgagagattctcttgcatcaggggtcttaccctgatgcaagagaatc

SEQ ID NO: 92 - DNA, 13454 bp, Artificial Sequence
  Synthetic
  misc_feature (1)..(8579): n is a, c, g, or t
nnnnnnnnnnnnnnnnnnnnnnnnnnnnnnnnnnnnnnnnnnnnnnnnnnnnnnnnnnnnnnnnnnnnnnnnnnnnnnnnnnnnnnnnnnnnnnnnnnnnnnnnnnnnnnnnnnnnnnnnnnnnnnnnnnnnnnnnnnnnnnnnnnnnnnnnnnnnnnnnnnnnnnnnnnnnnnnnnnnnnnnnnnnnnnnnnnnnnnnnnnnnnnnnnnnnnnnnnnnnnnnnnnnnnnnnnnnnnnnnnnnnnnnnnnnnnnnnnnnnnnnnnnnnnnnnnnnnnnnnnnnnnnnnnnnnnnnnnnnnnnnnnnnnnnnnnnnnnnnnnnnnnnnnnnnnnnnnnnnnnnnnnnnnnnnnnnnnnnnnnnnnnnnnnnnnnnnnnnnnnnnnnnnnnnnnnnnnnnnnnnnnnnnnnnnnnnnnnnnnnnnnnnnnnnnnnnnnnnnnnnnnnnnnnnnnnnnnnnnnnnnnnnnnnnnnnnnnnnnnnnnnnnnnnnnnnnnnnnnnnnnnnnnnnnnnnnnnnnnnnnnnnnnnnnnnnnnnnnnnnnnnnnnnnnnnnnnnnnnnnnnnnnnnnnnnnnnnnnnnnnnnnnnnnnnnnnnnnnnnnnnnnnnnnnnnnnnnnnnnnnnnnnnnnnnnnnnnnnnnnnnnnnnnnnnnnnnnnnnnnnnnnnnnnnnnnnnnnnnnnnnnnnnnnnnnnnnnnnnnnnnnnnnnnnnnnnnnnnnnnnnnnnnnnnnnnnnnnnnnnnnnnnnnnnnnnnnnnnnnnnnnnnnnnnnnnnnnnnnnnnnnnnnnnnnnnnnnnnnnnnnnnnnnnnnnnnnnnnnnnnnnnnnnnnnnnnnnnnnnnnnnnnnnnnnnnnnnnnnnnnnnnnnnnnnnnnnnnnnnnnnnnnnnnnnnnnnnnnnnnnnnnnnnnnnnnnnnnnnnnnnnnnnnnnnnnnnnnnnnnnnnnnnnnnnnnnnnnnnnnnnnnnnnnnnnnnnnnnnnnnnnnnnnnnnnnnnnnnnnnnnnnnnnnnnnnnnnnnnnnnnnnnnnnnnnnnnnnnnnnnnnnnnnnnnnnnnnnnnnnnnnnnnnnnnnnnnnnnnnnnnnnnnnnnnnnnnnnnnnnnnnnnnnnnnnnnnnnnnnnnnnnnnnnnnnnnnnnnnnnnnnnnnnnnnnnnnnnnnnnnnnnnnnnnnnnnnnnnnnnnnnnnnnnnnnnnnnnnnnnnnnnnnnnnnnnnnnnnnnnnnnnnnnnnnnnnnnnnnnnnnnnnnnnnnnnnnnnnnnnnnnnnnnnnnnnnnnnnnnnnnnnnnnnnnnnnnnnnnnnnnnnnnnnnnnnnnnnnnnnnnnnnnnnnnnnnnnnnnnnnnnnnnnnnnnnnnnnnnnnnnnnnnnnnnnnnnnnnnnnnnnnnnnnnnnnnnnnnnnnnnnnnnnnnnnnnnnnnnnnnnnnnnnnnnnnnnnnnnnnnnnnnnnnnnnnnnnnnnnnnnnnnnnnnnnnnnnnnnnnnnnnnnnnnnnnnnnnnnnnnnnnnnnnnnnnnnnnnnnnnnnnnnnnnnnnnnnnnnnnnnnnnnnnnnnnnnnnnnnnnnnnnnnnnnnnnnnnnnnnnnnnnnnnnnnnnnnnnnnnnnnnnnnnnnnnnnnnnnnnnnnnnnnnnnnnnnnnnnnnnnnnnnnnnnnnnnnnnnnnnnnnnnnnnnnnnnnnnnnnnnnnnnnnnnnnnnnnnnnnnnnnnnnnnnnnnnnnnnnnnnnnnnnnnnnnnnnnnnnnnnnnnnnnnnnnnnnnnnnnnnnnnnnnnnnnnnnnnnnnnnnnnnnnnnnnnnnnnnnnnnnnnnnnnnnnnnnnnnnnnnnnnnnnnnnnnnnnnnnnnnnnnnnnnnnnnnnnnnnnnnnnnnnnnnnnnnnnnnnnnnnnnnnnnnnnnnnnnnnnnnnnnnnnnnnnnnnnnnnnnnnnnnnnnnnnnnnnnnnnnnnnnnnnnnnnnnnnnnnnnnnnnnnnnnnnnnnnnnnnnnnnnnnnnnnnnnnnnnnnnnnnnnnnnnnnnnnnnnnnnnnnnnnnnnnnnnnnnnnnnnnnnnnnnnnnnnnnnnnnnnnnnnnnnnnnnnnnnnnnnnnnnnnnnnnnnnnnnnnnnnnnnnnnnnnnnnnnnnnnnnnnnnnnnnnnnnnnnnnnnnnnnnnnnnnnnnnnnnnnnnnnnnnnnnnnnnnnnnnnnnnnnnnnnnnnnnnnnnnnnnnnnnnnnnnnnnnnnnnnnnnnnnnnnnnnnnnnnnnnnnnnnnnnnnnnnnnnnnnnnnnnnnnnnnnnnnnnnnnnnnnnnnnnnnnnnnnnnnnnnnnnnnnnnnnnnnnnnnnnnnnnnnnnnnnnnnnnnnnnnnnnnnnnnnnnnnnnnnnnnnnnnnnnnnnnnnnnnnnnnnnnnnnnnnnnnnnnnnnnnnnnnnnnnnnnnnnnnnnnnnnnnnnnnnnnnnnnnnnnnnnnnnnnnnnnnnnnnnnnnnnnnnnnnnnnnnnnnnnnnnnnnnnnnnnnnnnnnnnnnnnnnnnnnnnnnnnnnnnnnnnnnnnnnnnnnnnnnnnnnnnnnnnnnnnnnnnnnnnnnnnnnnnnnnnnnnnnnnnnnnnnnnnnnnnnnnnnnnnnnnnnnnnnnnnnnnnnnnnnnnnnnnnnnnnnnnnnnnnnnnnnnnnnnnnnnnnnnnnnnnnnnnnnnnnnnnnnnnnnnnnnnnnnnnnnnnnnnnnnnnnnnnnnnnnnnnnnnnnnnnnnnnnnnnnnnnnnnnnnnnnnnnnnnnnnnnnnnnnnnnnnnnnnnnnnnnnnnnnnnnnnnnnnnnnnnnnnnnnnnnnnnnnnnnnnnnnnnnnnnnnnnnnnnnnnnnnnnnnnnnnnnnnnnnnnnnnnnnnnnnnnnnnnnnnnnnnnnnnnnnnnnnnnnnnnnnnnnnnnnnnnnnnnnnnnnnnnnnnnnnnnnnnnnnnnnnnnnnnnnnnnnnnnnnnnnnnnnnnnnnnnnnnnnnnnnnnnnnnnnnnnnnnnnnnnnnnnnnnnnnnnnnnnnnnnnnnnnnnnnnnnnnnnnnnnnnnnnnnnnnnnnnnnnnnnnnnnnnnnnnnnnnnnnnnnnnnnnnnnnnnnnnnnnnnnnnnnnnnnnnnnnnnnnnnnnnnnnnnnnnnnnnnnnnnnnnnnnnnnnnnnnnnnnnnnnnnnnnnnnnnnnnnnnnnnnnnnnnnnnnnnnnnnnnnnnnnnnnnnnnnnnnnnnnnnnnnnnnnnnnnnnnnnnnnnnnnnnnnnnnnnnnnnnnnnnnnnnnnnnnnnnnnnnnnnnnnnnnnnnnnnnnnnnnnnnnnnnnnnnnnnnnnnnnnnnnnnnnnnnnnnnnnnnnnnnnnnnnnnnnnnnnnnnnnnnnnnnnnnnnnnnnnnnnnnnnnnnnnnnnnnnnnnnnnnnnnnnnnnnnnnnnnnnnnnnnnnnnnnnnnnnnnnnnnnnnnnnnnnnnnnnnnnnnnnnnnnnnnnnnnnnnnnnnnnnnnnnnnnnnnnnnnnnnnnnnnnnnnnnnnnnnnnnnnnnnnnnnnnnnnnnnnnnnnnnnnnnnnnnnnnnnnnnnnnnnnnnnnnnnnnnnnnnnnnnnnnnnnnnnnnnnnnnnnnnnnnnnnnnnnnnnnnnnnnnnnnnnnnnnnnnnnnnnnnnnnnnnnnnnnnnnnnnnnnnnnnnnnnnnnnnnnnnnnnnnnnnnnnnnnnnnnnnnnnnnnnnnnnnnnnnnnnnnnnnnnnnnnnnnnnnnnnnnnnnnnnnnnnnnnnnnnnnnnnnnnnnnnnnnnnnnnnnnnnnnnnnnnnnnnnnnnnnnnnnnnnnnnnnnnnnnnnnnnnnnnnnnnnnnnnnnnnnnnnnnnnnnnnnnnnnnnnnnnnnnnnnnnnnnnnnnnnnnnnnnnnnnnnnnnnnnnnnnnnnnnnnnnnnnnnnnnnnnnnnnnnnnnnnnnnnnnnnnnnnnnnnnnnnnnnnnnnnnnnnnnnnnnnnnnnnnnnnnnnnnnnnnnnnnnnnnnnnnnnnnnnnnnnnnnnnnnnnnnnnnnnnnnnnnnnnnnnnnnnnnnnnnnnnnnnnnnnnnnnnnnnnnnnnnnnnnnnnnnnnnnnnnnnnnnnnnnnnnnnnnnnnnnnnnnnnnnnnnnnnnnnnnnnnnnnnnnnnnnnnnnnnnnnnnnnnnnnnnnnnnnnnnnnnnnnnnnnnnnnnnnnnnnnnnnnnnnnnnnnnnnnnnnnnnnnnnnnnnnnnnnnnnnnnnnnnnnnnnnnnnnnnnnnnnnnnnnnnnnnnnnnnnnnnnnnnnnnnnnnnnnnnnnnnnnnnnnnnnnnnnnnnnnnnnnnnnnnnnnnnnnnnnnnnnnnnnnnnnnnnnnnnnnnnnnnnnnnnnnnnnnnnnnnnnnnnnnnnnnnnnnnnnnnnnnnnnnnnnnnnnnnnnnnnnnnnnnnnnnnnnnnnnnnnnnnnnnnnnnnnnnnnnnnnnnnnnnnnnnnnnnnnnnnnnnnnnnnnnnnnnnnnnnnnnnnnnnnnnnnnnnnnnnnnnnnnnnnnnnnnnnnnnnnnnnnnnnnnnnnnnnnnnnnnnnnnnnnnnnnnnnnnnnnnnnnnnnnnnnnnnnnnnnnnnnnnnnnnnnnnnnnnnnnnnnnnnnnnnnnnnnnnnnnnnnnnnnnnnnnnnnnnnnnnnnnnnnnnnnnnnnnnnnnnnnnnnnnnnnnnnnnnnnnnnnnnnnnnnnnnnnnnnnnnnnnnnnnnnnnnnnnnnnnnnnnnnnnnnnnnnnnnnnnnnnnnnnnnnnnnnnnnnnnnnnnnnnnnnnnnnnnnnnnnnnnnnnnnnnnnnnnnnnnnnnnnnnnnnnnnnnnnnnnnnnnnnnnnnnnnnnnnnnnnnnnnnnnnnnnnnnnnnnnnnnnnnnnnnnnnnnnnnnnnnnnnnnnnnnnnnnnnnnnnnnnnnnnnnnnnnnnnnnnnnnnnnnnnnnnnnnnnnnnnnnnnnnnnnnnnnnnnnnnnnnnnnnnnnnnnnnnnnnnnnnnnnnnnnnnnnnnnnnnnnnnnnnnnnnnnnnnnnnnnnnnnnnnnnnnnnnnnnnnnnnnnnnnnnnnnnnnnnnnnnnnnnnnnnnnnnnnnnnnnnnnnnnnnnnnnnnnnnnnnnnnnnnnnnnnnnnnnnnnnnnnnnnnnnnnnnnnnnnnnnnnnnnnnnnnnnnnnnnnnnnnnnnnnnnnnnnnnnnnnnnnnnnnnnnnnnnnnnnnnnnnnnnnnnnnnnnnnnnnnnnnnnnnnnnnnnnnnnnnnnnnnnnnnnnnnnnnnnnnnnnnnnnnnnnnnnnnnnnnnnnnnnnnnnnnnnnnnnnnnnnnnnnnnnnnnnnnnnnnnnnnnnnnnnnnnnnnnnnnnnnnnnnnnnnnnnnnnnnnnnnnnnnnnnnnnnnnnnnnnnnnnnnnnnnnnnnnnnnnnnnnnnnnnnnnnnnnnnnnnnnnnnnnnnnnnnnnnnnnnnnnnnnnnnnnnnnnnnnnnnnnnnnnnnnnnnnnnnnnnnnnnnnnnnnnnnnnnnnnnnnnnnnnnnnnnnnnnnnnnnnnnnnnnnnnnnnnnnnnnnnnnnnnnnnnnnnnnnnnnnnnnnnnnnnnnnnnnnnnnnnnnnnnnnnnnnnnnnnnnnnnnnnnnnnnnnnnnnnnnnnnnnnnnnnnnnnnnnnnnnnnnnnnnnnnnnnnnnnnnnnnnnnnnnnnnnnnnnnnnnnnnnnnnnnnnnnnnnnnnnnnnnnnnnnnnnnnnnnnnnnnnnnnnnnnnnnnnnnnnnnnnnnnnnnnnnnnnnnnnnnnnnnnnnnnnnnnnnnnnnnnnnnnnnnnnnnnnnnnnnnnnnnnnnnnnnnnnnnnnnnnnnnnnnnnnnnnnnnnnnnnnnnnnnnnnnnnnnnnnnnnnnnnnnnnnnnnnnnnnnnnnnnnnnnnnnnnnnnnnnnnnnnnnnnnnnnnnnnnnnnnnnnnnnnnnnnnnnnnnnnnnnnnnnnnnnnnnnnnnnnnnnnnnnnnnnnnnnnnnnnnnnnnnnnnnnnnnnnnnnnnnnnnnnnnnnnnnnnnnnnnnnnnnnnnnnnnnnnnnnnnnnnnnnnnnnnnnnnnnnnnnnnnnnnnnnnnnnnnnnnnnnnnnnnnnnnnnnnnnnnnnnnnnnnnnnnnnnnnnnnnnnnnnnnnnnnnnnnnnnnnnnnnnnnnnnnnnnnnnnnnnnnnnnnnnnnnnnnnnnnnnnnnnnnnnnnnnnnnnnnnnnnnnnnnnnnnnnnnnnnnnnnnnnnnnnnnnnnnnnnnnnnnnnnnnnnnnnnnnnnnnnnnnnnnnnnnnnnnnnnnnnnnnnnnnnnnnnnnnnnnnnnnnnnnnnnnnnnnnnnnnnnnnnnnnnnnnnnnnnnnnnnnnnnnnnnnnnnnnnnnnnnnnnnnnnnnnnnnnnnnnnnnnnnnnnnnnnnnnnnnnnnnnnnnnnnnnnnnnnnnnnnnnnnnnnnnnnnnnnnnnnnnnnnnnnnnnnnnnnnnnnnnnnnnnnnnnnnnnnnnnnnnnnnnnnnnnnnnnnnnnnnnnnnnnnnnnnnnnnnnnnnnnnnnnnnnnnnnnnnnnnnnnnnnnnnnnnnnnnnnnnnnnnnnnnnnnnnnnnnnnnnnnnnnnnnnnnnnnnnnnnnnnnnnnnnnnnnnnnnnnnnnnnnnnnnnnnnnnnnnnnnnnnnnnnnnnnnnnnnnnnnnnnnnnnnnnnnnnnnnnnnnnnnnnnnnnnnnnnnnnnnnnnnnnnnnnnnnnnnnnnnnnnnnnnnnnnnnnnnnnnnnnnnnnnnnnnnnnnnnnnnnnnnnnnnnnnnnnnnnnnnnnnnnnnnnnnnnnnnnnnnnnnnnnnnnnnnnnnnnnnnnnnnnnnnnnnnnnnnnnnnnnnnnnnnnnnnnnnnnnnnnnnnnnnnnnnnnnnnnnnnnnnnnnnnnnnnnnnnnnnnnnnnnnnnnnnnnnnnnnnnnnnnnnnnnnnnnnnnnnnnnnnnnnnnnnnnnnnnnnnnnnnnnnnnnnnnnnnnnnnnnnnnnnnnnnnnnnnnnnnnnnnnnnnnnnnnnnnnnnnnnnnnnnnnnnnnnnnnnnnnnnnnnnnnnnnnnnnnnnnnnnnnnnnnnnnnnnnnnnnnnnnnnnnnnnnnnnnnnnnnnnnnnnnnnnnnnnnnnnnnnnnnnnnnnnnnnnnnnnnnnnnnnnnnnnnnnnnnnnnnnnnnnnnnnnnnnnnnnnnnnnnnnnnnnnnnnnnnnnnnnnnnnnnnnnnnnnnnnnnnnnnnnnnnnnnnnnnnnnnnnnnnnnnnnnnnnnnnnnnnnnnnnnnnnnnnnnnnnnnnnnnnnnnnnnnnnnnnnnnnnnnnnnnnnnnnnnnnnnnnnnnnnnnnnnnnnnnnnnnnnnnnnnnnnnnnnnnnnnnnnnnnnnnnnnnnnnnnnnnnnnnnnnnnnnnnnnnnnnnnnnnnnnnnnnnnnnnnnnnnnnnnnnnnnnnnnnnnnnnnnnnnnnnnnnnnnnnnnnnnnnnnnnnnnnnnnnnnnnnnnnnnnnnnnnnnnnnnnnnnnnnnnnnnnnnnnnnnnnnnnnnnnnnnnnnnnnnnnnnnnnnnnnnnnnnnnnnnnnnnnnnnnnnnnnnnnnnnnnnnnnnnnnnnnnnnnnnnnnnnnnnnnnnnnnnnnnnnnnnnnnnnnnnnnnnnnnnnnnnnnnnnnnnnnnnnnnnnnnnnnnnnnnnnnnnnnnnnnnnnnnnnnnnnnnnnnnnnnnnnnnnnnnnnnnnnnnnnnnnnnnnnnnnnnnnnnnnnnnnnnnnnnnnnnnnnnnnnnnnnnnnnnnnnnnnnnnnnnnnnnnnnnnnnnnnnnnnnnnnnnnnnnnnnnnnnnnnnnnnnnnnnnnnnnnnnnnnnnnnnnnnnnnnnnnnnnnnnnnnnnnnnnnnnnnnnnnnnnnnnnnnnnnnnnnnnnnnnnnnnnnnnnnnnnnnnnnnnnnnnnnnnnnnnnnnnnnnnnnnnnnnnnnnnnnnnnnnnnnnnnnnnnnnnnnnnnnnnnnnnnnnnnnnnnnnnnnnnnnnnnnnnnnnnnnnnnnnnnnnnnnnnnnnnnnnnnnnnnnnnnnnnnnnnnnnnnnnnnnnnnnnnnnnnnnnnnnnnnnnnnnnnnnnnnnnnnnnnnnnnnnnnnnnnnnnnnnnnnnnnnnnnnnnnnnnnnnnnnnnnnnnnnnnnnnnnnnnnnnnnnnnnnnnnnnnnnnnnnnnnnnnnnnnnnnnnnnnnnnnnnnnnnnnnnnnnnnnnnnnnnnnnnnnnnnnnnnnnnnnnnnnnnnnnnnnnnnnnnnnnnnnnnnnnnnnnnnnnnnnnnnnnnnnnnnnnnnnnnnnnnnnnnnnnnnnnnnnnnnnnnnnnnnnnnnnnnnnnnnnnnnnnnnnnnnnnnnnnnnnnnnnnnnnnnnnnnnnnnnnnnnnnnnnnnnnnnnnnnnnnnnnnnnnnnnnnnnnnnnnnnnnnnnnnnnnnnnnnnnnnnnnnnnnnnnnnnnnnnnnnnnnnnnnnnnnnnnnnnnnnnnnnnnnnnnnnnnnnnnnnnnnnnnnnnnnnnnnnnnnnnnnnnnnnnnnnnnnnnnnnnnnnnnnnnnnnnnnnnnnnnnnnnnnnnnntgcacaggacaggagacccacgatggcaacgctgagcgacatcacggcgcttgagtcggccgtgcgggcagccgtggcgcagacgacgatatcggacatccacacgcacctcttcccaccctctcacggccggctgctgctgtggggcgtcgacgagctgttgacgtaccactatctggtggccgaacttttcaccgtggccccgcgcgacctgacccttcagaagttctggaagttggacaagtcccgccaggcagagctggtctgggagcatgtgttcctgcgtcacggggcgctgagcgaggccgccaggggcgtcatcacggccctctcggccttgggactggacgtggccgggcgcgatcttgcgggcatccgccggtggttcgccgcccagaatgtcgagggctatctcaagaaggtctttgagcttgccaagctggactacgcagtgatgactaacaaccccttcatcgccgaggaggccggctattggaggcgggacctgccgcgaccttactacatgaaggcggcgttgcggatcgacacgctgatcctggactggccagccgccgcaagggcaatgaagtccgccgggtacaggaccgccggggcaacggggaccagcttcacccaggcccgcaagttcctcaccgattgggccaagaccatgcagccggtctacatggcggcgtcgctgccgccggagttcgcctatccctggcggtcgcgaagcgggctggtgatggacaaggtcgtcctcccggccgccaaagagctggggttgccgattgccatgatgatcggggtccgcaagaaggtcaatccagccttgggcgacgggggcgacggggtgggtgtcgccgatccgacggccgtgcagcacctctgccagagacacccggacgtcaagttcatcgtcacgatgctgtctcgggtcaaccagcaggagctgtgcgtgctggggcggaagttctccaacctgcacgtggagggctgctggtggttctgcaacaatcccagcatcgtcgaggagatcacgcggatgcgcctggagctgctcgggacggccttcaccgcccagcacagcgacgcacgcgtgctggaccagctcatctacaagtggtcgcacatgcggaccgtgctcgccaacgtgctggtggacaaataccgcgaccagttccttgccggctggcgggccagcgaagaagaaatccgccgcgacgtccgctctctcctgggcggatccttcgaggaattctgcaagaagtagcaggcgcttggcgcggcggggtgtacgcatgctcgttgcttggaagggtggtgggggaccgacccgccaccctgggtcttctgatccggaatccctattgccaaccccaaccgggacaagtaaactctgtggtctggggtgcgattcatggagaacgtcctcgggatagaccttggtgggaaagcggtcgggctggcggtagtcgagcagccctccaaccgcgtccagtggtgcgggaccgtaagactctcggacaagatcaaggacctctacgaccttcggcgaaccctccgccgcgccaggcgaagccgggtgcgttatcgaaagcccaaggtcgccgaaagaggaggcggggccggggggaaaggcgaggagggggcgacctacttctaccggaaagccaaagggctgaatcagtcgctgcggacaaagtgcaagtacgtcgatccccagacgggagaagtctgtggaaagaacacgccccagatggccaatgtccgccacctcctcctggaggacatactcggctttgcgccctttgccccggtgggggaggactgcaagcaggccatccgagacatcctggcctcgcaggacggcgacgcgcgacgccgggaacgcctcgagaacgtcctggggctgatcgatctgtccgaatacctcgaggagcagatcaaggacatcatcttcgggaagggcgacgggcgtgcccagttctgccgctcgcacatcctgggccaccactcgcagaccgagactcccaagcaggccgcgtggttgccgccatcgctgaagctcaagcaggatttcatcctcaaggtcatccgcgagcggggcaagccttgccgcatcgatcgaataataatcgagcgggcgaacttcgacctccagaagatcgcggcgggggtgatcgaagacccgcgcgagtaccagcaagggtatcgctacggatttcgcaatacccgtgcggcgctgatgcaggaatacggggcgaggtgttgttattgcggtaagagcgtggcggggcagaaatggcacatcgaccacgtcgatccgcgcaggacgggcgagatcaaccgctgggacaacctcgccatagcctgtgaaaagtgcaatcacagcaaaggcgggaagacccccaaggacgcgggcatgcgcttcgcggtggtgacggagaaggtcgctgggcgcaagatacgccgctccctggccccgaagcccgtcgagggcacccgcattcacaagtacatgacccagaccgaccagggcataaacatgctaaagaacgctctgagggaaatcttccccgctgctcccatcgaggagaccttcggctacgagaccgccgcctggcgggacctgtgggggctggagaagggcaaggaaaaaggcgagcaccacaacgatgccatcgtcatcgcttcagcccgtgtcccggaagggattcccaaggcagacgcgcagcccgaggcaatatcgcagaccgttggtgggaagcgcctcttcgatctcaacccggtctcccgctcgcccaacgggcgttactaccagagaacgccggttttggccgaatccggggggataactcccaggcaactccccgccgtggtggaccagcgcaagcggaagctcctggcacgcgagttcgaacgctacgggatcgaggggaacaagaaactcccggaccgggcccgggagcgcctgcccttcaagagcgtcttgctgctcaagcgggactgcgcggacgggaatgtgcgccggatgagaaccggtcattccttcaaggtctccaatgccggcggaaccagggtcaacgaagcggtaatcgtctacgagaaccttttggggaaactatcctgttacccgctcaagaacccccgggccttcgggcctacgagaccaccggatgatttcaagagggaattgttccgattccgtgcaggcgacagaatcgttgacctcaacggaaggtccctcggggaggttgtggagtttgggagcgacggcaggttgacaacagacaaaggacataacacaatagcacacaggtgcagacgggggagttaggcaaaaagccttccctgctcccccgtgcggtggatcgatagaccgaagggtcttggagctttttggcaagtcaataggtgagtgccctgcgagcctcgcgagcatgggattgatgcctgtacgacaggacggacacgttcttctacgatttcggcctcgcgagcgtgggattgattaccgtatggcatatcaggaacaggagcaggaacatttcgggctcgcgagcatgggattgatggcccaagcgggttgcggcgtgaggcagtgcggatttcggcctcgcgagcatgggattgatgccctcgctgagtgtttccgtctcggcatcttgcaatttcggcctcgcgagcatgggattgatgccctcgctgagtgtttccgtctcggcatcttgcaatttcggcctcgcgagcatgggattgatggcgtctcgcctgcggtcctagtctcatgcacaatttcggcctcgcgagcatgggattgattgactccctgtcgaatccagcgcaagcggacgaaatttcggcctcgcgagcatgggattgatgttacagtgcgtcccagtggtcccactgactgcatttcggcctcgcgagcatgggattgatgggtgaagcaaacaggatcaaggcatttgagtacatttcggcctcgcgagcatgggattgatactgaggggtagtgcctcgaaggtgggcagaaccccacccattgtgggccaggcaaaagaagtctcaaccgcgaactaccctggaattcccgtgttcctcgaggtcgaaagcagccacagcgaaggccccgcaagggcgcctgccggagaatccaacgaaaggcggaatccggccacgagctacgtttgcagggaagcctaagacctatgccgggatgtagtgactcgtctacccagccccggcctcttggagtctcggcccggaagatcaacgccctccccccggttcgccggggaagggagagaaaggtcctcgtgaggggacatcgcgctgggcgaccacgcgacgcccgccctcgggcgggtgagacaagtcgagacacgtgcgacctgcaaacattggctggggatagacgaggattgtttttcctcccatatgctcccgcggggcactcacctgttgctgtgattatgtaaacggggaatggaactcgttggtctatcttcgaaccgcggggccgcgggtgctacatcagcgcggtggagaagtagcgttcggcgcggtcgggcaggacggtggcgatgttgccggcgattcgcccggccagttggcgggccgcccagacgttggcgccgctggatatgcccacgagcaggccgtaatcgcgacctagctggcgggtggtctcgatggcgtcctcgtctgacacctcgaccacctcgtcgatcatcttgacgtccaggatggccgggacgaacccgtcgccgattccctggatctggtgcagccccggctcgtggcccagcagggccgagacgttcttgggttccaccgcgacgatccgcgccgcgggcctgtgctccc

SEQ ID NO: 93 - DNA, 2637 bp, Artificial Sequence
  Synthetic
atccagggttacgctatccattgattttggttacaagaatatcggccttgctttggtgagggaccatgagggaatcaataccccactgttcgcagggaccctcctctacgacccctttcaactcagcacaaaggttggaccaagggcggaactccgcaggggacgccgaaccagaaaaacaaagaaacaccgtctaaatcttttaaaaaagaaattgttcgatacaaatcttacagaaggagcggttcaagaacttattactttttgtaggcggaggggttatagctctctgtttgatgtaaaaggcccccttaagaccgagaaagttggctcaaaagaggaaatcgtttttcgttttactagagaagagttttttgaggcattagaaaaacagatagatagattggtccctgatgaaaaaaggagattggtcctcggcttatgcgaaaacatccttaaccgagccggtgaaccttctaaagaaatccggccattaagaattaacaatcgaggagcctctcggtgtgcctgggatgggtgtgagaatgtgacgccacgccgggacaatgctcttcgggaccccctgtcccaattcattcatacagtttttgctgtgagtctcagaagtgatacagccctccaacaggaagtcgcaagaatgttagaccgtatcgcagaattgggaaagcggctccgccatcgaggaggccctaatccagacaaagagcgtaaagttctaaaggcagaaatcagcgaggaacttaaactgttaaagaagttgtatggcctcagcactgatttgactgaagaggatgctaccccctgggcaaggattcggcggaacataatgaacctgatagaacagaccggaggccgtaatcgattctgccgttcccatagttctcaatatgtcaattacttcatggagggaaaaccgataccctttaaggcaaccttgagcgaaagggatttagtgtcccgccgtgaagaaatcctcttccaaaagatatggcgttatattgaagcaagaatccttccccgtgcccctgatggaattgaccgggtgattgttgagcgaacagccatcgacctattaggaggaagtcgcaaacagcgccaaggcataatgaacaaagaagcccttgaagaaatgtatcaatatgggcctcgatacggattcagcgatgatcttgaaatgctgagggaggaatttggtggactctgtgtctattgcggcaagcaaaatgccgaacttcttgaaagagaccatcttctgcctcagtccaaatttttctttgacagttatctgaataaagttccggcttgcgcaccctgcaatcgaacccttaaacaagccgcctcacctggggaggcagcactcaggattcacgaagacgcatacgatgcctattctaaatatttgggttctaaatttagggataaacctcctcatctgtttcataccatcaagaaaggtgtcctcaatctcatgcgagagccaactcgcgtttggaaagttgagcggtatctcaacctcatcgccaatcagtttgcccaagtggtggggacccagcgagggcctcgcccccttgctcgttatctcagcggtaagatttataaacggtttggtgagaagccccagattggctttgtcaatgggaggcatactgctatttggcggagggcggcctatccagagtttgacaaattcagggataaggccgagggtggaattatcaatcatgctctggatgcactcctgatggcttgtgacttgcctgatttgaccgcacttgaagcaaggaatttacagcctggtctcatgtcttggtgggtggatagggtcaggaaagcagccccaccggaagggccggatggaataccggtaatgcctgaaccccggttcgcaacagacggttttgaggaagttcatcctgggaattatattaaaactgacttggcaaagatgaactggaaccataaagacactcaggtccaacgccagggtgcctatggctggtcaaaaaaagaagacctacctgtacagcgggttacggctgctagtctcgctgacgaacttcgtaaggccgataaaaaaacgtctccagaatcgaggagggtcgaggtcgataaaattgtaggtgtgattgttcacccgcaacttcaccaaaccctgaagggggcaaatattggagacaccccaacgttaagcacagcagaggcacttacactctggttgcgaaaaacaatccggggtaacctaagcaaagcccggttttcctctcatcccgcagaccaatcaaggtctaaaatacttcaggatttcatcaacgggcagtctaatgtaatccctgcggttattggagtccaaagattccaacgctctctgaaatccaatattgacttaaatcgagttgacccccaaagcggtcgccttatccaccgatacgtcgctgacccggcaaatgtggcttacatagtagcctaccgacgagacaatggtaaagtcaaacgagacaggccgctgacgcttgagtggcgtcagagcggagccgtcatccctggtgtcaaattgtttggagatgtccccgaaggtccattgaaaggtcgttcattgggtgaaaaagccatcgaaca

SEQ ID NO: 94 - DNA, 12532 bp, Artificial Sequence
  Synthetic
tcgagaagaccggaaagatcaaaataggtttcagggaggattctatcccctttgctttcatagacccgaaggtgggaaagcagataggtttctccgtggacatggcccagctccttgctgaaaacctctccaaacactttggcaagaagatcgagattgagccggttaccattaccacaaagacccgtatccccatgatcatcaacggaactattgatgtggagatgggatccacgacatacactcaggaacgggaagatgtggtggacttcagcctgattttcttcttctccgagacggcctttcttgtacccaagaatagtcccatcaagaccaaaaaagatctgaccggtaaacggctggggggcgctcagggaacgacgaacctcaaagccatggaggatcaagccaaggccggagagtacaaaccaaaagagatcgtcaccgttgagggacatgcccagggattcctcagtctcaaaaccggtaaaatcgatgcctacgccacagatcgaagccttctgatgggtcttgcttccaaagacgaaaatccgggtgcctggcggacaacggatttcgccatcgcctatgagccttacgggtatctgatgcgagagggcaattcgaatttcagggatttcgtcaacaataccatcctttcggcgatcaagactggtaaattctatgagctttatgacaagtggatgggacccaaaggacagaccccgattcccatgtctcaggcttacaaagactacctgaaactcattgtctaccccatgaaggacgattggtggaagaagcaataagaacagtcatcccaagataagaggccggagcgttcaggatgtttgcctcagtcatatgaggagacgccggcttcgacagactcttatgctgtgggtgctccccgccttccccggggtattggaagaggtttgattgtcaattgtaagaggaataataaggaatgggactggcatataagtttgactggagcgtgctgtggcgcgagccttacggagaatggatgctgcaggggatatggctgactttgcagatggggtttctcgcatggatcattgctctttttctgggaatctttgtcggcacgatgcgtgctgcgccatggaagctgttgcgcctggtgagcacgatctacgtggaaatctttcggaatgttcccttccttgtccagctcttcttctggttctatgccggtccaatgatcttcggcaagacccttcagttcaagatcaacgccatctccgggttgaattattacgttgcagttgtcggcctggggctttacacggcaagccgcgtggctgagcacgtgagggccggatttgcctccatcggccaaggtcaataccaggcagctctatccacaggcatgagtcagtggcagatgtactggcacatcatgattccccatgcgctgcgccttatccttccgccccttacgacggaattcctcacgatcttcaagaactcttcggtggccatgaccatcggcgtggccgagaccactttcatgagctacaagatcgattcggatacattccacgggttggaggctacgacgggagccatgtttgtctaccttgtcctgggaatggcggtggtaaagaccatgagttacattgagacaaaattccggattcatggactggtaggcagataatatgtttgatgcgatcatcaacaacctttcctaccttttgaagggattcctgacaaaccttgaattggcgatctgcgctcttgcaggaggaatcttcttgggtatcttggtaggtctggggcggatctccaagaaccgttgggtgtatcacagtgtaaccctttacgtgaactttatccgaaacatccccctcatcctggttatcttctggttctactttatcatgcccatcctagtcggtaagcccctgaaccctttcctctctgcggccatttcctttgtggtctttgaagccacctatttcggagagattttcagggcaggctttcagtccatcagccgtgatctggtaagcgctgcttactcaacagctcttacttacactcagacagctcgttacatcctcgtgcccatcgccatccggcggatgctccccagcatgatcactcaaagcatcatcacctttcaggataccagcctggcttatgtcatcggacttcaggagttagttcgtagaaccaccatcgtcgatagtatggaggtgcgctccatccagctttacagcttcgttgccgcgcttttctttgtcatctgttttgtcggatctcgcatcagccgttactatgagatgaagagtcgagaggccaatatcctatgatagaaatcaagaacgtgagcaagtggtacggtgacttccaagtcctgagcggcatcaacgagaccatcgaccggggccaaaccgtagtcatctgtggccccagcggttccggaaagagtacgctccttcggtgcatcaacggcctggagtcttaccagaagggtgagatcaccgtggagggtatctcattaagcgaccccaaaacgaacctttacaaggtgcgccggaagatcggcatggtctttcagaagttcgagctttacccccatatgacggtcctgcacaacattaccctggctcccatgaaggtactgaaaaagtcgaagcaagaagctgaaaagagggctattgcacttcttgaacgtgtaggcattcctgaaaaagcgaaggaatacccggcgaacctctccggcgggcagcagcagcgggtggctattgcccgcagcctggctatggatccgagctacatgctctttgatgaaccgacctctgctttggatcctgaaatgatcaaggaggtgctcgatgtcatgatcgacctggccaaagaagggatgaccatgatcgtggtcacccacgagatgggctttgcccgcgaagtggccgatgagatcatctttattgatgaaggcaaaatcgtcgaaaggggaacggacgagagtttttttgcaaaccccaagagcgaacgcacaaaggcattcctcagtcagatcctggtctgaggcccggctgaaaggggaggggaagttggcagagaagatcatcggcatactcggcggcatggggccggaggcaaccttggactgttttgaaaaaatcataaggaataccccggccgtaaaggatcaagaccatctgcgggtcattattgattcaaactccaaggcgcctgaccgaacagaagccattctcggtaaaggggcttctctactgccgctgttggttcaaggatgcaggacgctgcaacaggcgggcgccgatttcatcatcatgccctgtgtgtcggctcatttttaccaagaggagatgcgacaacagataacccttccctttgtctctatttttgacgttgtggccgagaccatttcccatgatcatccggaaatcaaagtggtggggttgctgggtaccaccggtacggttcgcagcggtctttttcaaaaaagactgggagaggatggaatcgagaccattgtttgcgaggataagatccaggaacgggtcatggccgccatctacgatgttaagagcagtcaggcggatcggccgcgagaggcaattacggatgatcttgttgctgccgcccaaagcctcatcttccggggagccctggggattgtggccggctgcacagagattcctcttgctttgagtcaacgcgacctgtctgttccctattttgacgtcctttttcttcttgcccgtgcggccatccgcctggccggaaaagagcctctttctctgcgataaaggccgtgtcttttcatgagttcaataaaaagcaaccgaatcacgcgcagccggctggaagggcaaaagcagggttgcggctgtgttcaatcttgagaggacaggatgtctatgactgtcgaacaactggagtgagccttaagttaagtgtatgaatgacaatatggtgatgggcgaagtgcctgtcttatgatatagaagaatgcaaggaggaaaaatggacctcagtcgttttccacgtcgacgttataccgaaggacaaacacctattgaaaaactttcccgcttttccaaacaactggacggccccacgatctacatgaaaagggatgatcttttgggacttgcggcagggggcaacaagacccgcaagctggagtttgtggttgcagatgccatcacaaaaggcgctgatacgctcatcacctgtggagcagtccagtccaaccactgccgcctgactcttgccgcagccgtcaaggaggggctcaagtgcaggctgattctggaagaacgggtgcctaagagctacaatcttcaggccagcggcaacaacttcctgtttcaattgatgggagtggagaaaatcaaggtcgtgccgggcggttcggatatgatgaaagagatgcagactgaggccgatgaagtggcagctgccggccgcaaagcatatatcatccccgggggagcttccaatagcctcggcgctttgggatatgtggcctgtgctgaggagatcttgaatcagatctttgaaaagggcctgaggatccaccgcgtggtctgtgccagcggcagtgcagggacccatgccggcctcgttacgggtttttgcggtaccaacagcaatatcccggtggtcggaatcaacgtcagccgcaccaaggaagctcaggaagaactcgtctacgggttggtccagaaaaccgcggagcatgtcggtgtcgagggaaagatccccagggaagcggtgctctgtttcggggattacgttggagcgggatactccctccccacccccgacatgaccgaggcggttaaactgctggcacgtaccgaagcgatcctgctggatccggtctataccggcaagaccatggctggaatgatcgaccttgtccgcaaggggtatttcaaaaaggacgaaaacatccttttcgtccacaccggcggatcaccggccctttatgcttatagggaaacctttctgagcggagtttaaacccgacctcttcctagaccaaaggggtcattggtaacgatgcacttcgattattcagattctcagatttcattcgatgattccttctatgccgatcccgattacccgatcgattcctatctaagctgatggggctattgatcttattcgggcggataggggttggtctgtcctttataagggttgattccccgctcctgggggcgaaatccctgtttgcgatggtttcgaatccattcgatggtacaacggaaaaggacaaggtactacattctttataaagaccgtgaattacgatatcgaaaggggtacaatatctgctatctatcatctgtttccgatacgttaaaaaagtcacgatctgattttcatatattcatttgggacgtgatttctaccagtaatcctctgcccaagatgttatcgttgagcgatgacttgtaggtgcaaagcgttaaaattgagcatccttttattaccaccaacatcccctcaatggtcagtgccggaatttagaggcaaacacccttccaattcttattgacaccccattccgtaaagaatacaatcaaatcgaaatataggctatttgtcattaacctctaaccattgggtgggtatatgatctggagatgaatttagaccccatttctgaagtaggaatatggtttttgttgtttttacatctataattccttaaaggatatggagacaaaggtaacactatccatcgatttcggttccaagaacatcggccttgccttggtaagaaaccaggaaggagtaaacattcctttgttcgctggcactctcctatatgatccctatcaactcagcacaaaggtagggccaagggcagaacttcgcagagggcgccggaccagaaagacaaagagacaccgcctaactcttttaaagaaaaagctacttgcaataaatcttcccaacgaaacaattcagcaacttattaccttttgcaggcgccgagggtattcttccctttttgatgaacctcagaaaatcgaccaagaagcaaaggactcaaaagaggaaatcgtttttcgtttcagtcgggaggaattttttagagcattagaaaaacagatagaattgttggtccctcaagaaaaaagtgggaaagttctcgcttcatgtgaggacgtccttaaccgtgctggtgacccttccaaggaagtccgaccattaagatttaataatcggggagcctcccgatgtgcctgggatggatgcggaaatgttccgccgcgccgggataatgctcttcgggaccccctgtcccaatttgttcatacggtatttgccgtaagtctcagaggcgatgcaaccctccaggatgaggtcgcaagaatgttggaccgtatcgcggttttgggaaaacgcctccgtcatcgcaaaggccctgatccagataaagagcgcaaggctctcaaggcagagatcagcgatggactcaaactgttaaaaaaactgtatggcctaaaccctgatttgacagaggaggcggctactccctgggcgaaaattcggaagaatataacgaacctgatagaacagactggagggcgaaatcggttctgccgttaccatagttctcaatatgtgacccacttcatggaagggaaaccgatacccttcaaggcgactttgaccgaaagggacttggtgtctcgccgagaagaaatccttttccaaaagatgtggcgttatatcgaggcgagaattcttcctcttgtccccgatggcattgaccgagtgattgtagagcgaaccgccatcgaccttctggggggaagccgaaaacagcgccaaggcattatgaacaaagaagcccttgaggaaatgtatcagcatgggcctcgatacggattcgggaatgaccttgaaatgctgagggctgaattcgatggtctgtgtgcgtattgtggcaggccaaatgccgaattggttgaaagagaccatcttctgcctcagtccaaatttttcttcgacagctacctaaatatagttcctgcctgcccatcttgcaatcgggacttaaaacaagccgcctcaccaggaggggcttcgctcaggattaacgaacaggcatacgacgcctattctaagtatgtggcttctaagtttgcgaataaacctccccatttgtttcataacatcaagaagggtatcctcaatcttatgcgtgagcctggtcgcgtctgggagggggagcgaattctcaacattatcgccaaccagtttgcccaggtggttgggacccaacgagggcctcgacctcttgcccgttacctcagcgggaagatttataaacggtttggggagaagccccaaattggctttatcaatggaagacacaccgctctctggcgaaaggctgcttaccctgaattcgataagtttagggagaaaaaagagggtggtgttatcaaccacgccttggatgcactcctgatggcttgccacttgccggacctgacttctcttgaaacgaggaacttacagcccggtttgatgcattggtgggttgacaaggtgagaaaggctgccccacctaaaggcccagatggaatccctgggatacccgaaccacgctttgccgtggctggttttgaaaaggttcaccctggaaactatgtagaggtcgatttggcaaagatgaattggaatcacaaagattctcatattcaacgccagggtgattatggttggtcgaaaagggatgatcttcctgtccaacgtgtgacagctgcaagcatcgcggaagaacttcgtaagaccgataaagcggctactccagaatcgaggagtaccgaggtcgagaaaatcgtgaatgtgattgtccatcctcggctttatcaaacgctggagagagcaagtattggcgacagcccaggggcaagcacagcagaagcactcaaaatctggctgcgaaaagcaatcaaagggaatttatacaaatcacagttttcatcccatccagcagaccaacgcagggctaaaatgttccaggattttattaatgggcaaactgatgtgattccagcggtcattggagttcaaagattgcaacgctcgctgaaatccaatattgatctaaatcgagttgaccctaaaagcggtcgccttgtgcatagatatgtcgctgacccggcaaatgtggcttacatagtagcctatcgaggaagtaatggtaatgtcaaacgagatagaccgctaacgcttgaatggcggcagagcggagccttaatccctggtgtcaaattgtttggagatgttccggaagggccattaagaggccgcgcattgggtgaaaaagcgattgaccagaaagaatggaagaatgctttgcatcaatacctgaccagggcagggatagctgaatataactttgtgtctcaagggaatgtagtggtttatgaagatggcagcgaattgtatatcaggaacttttctggtagctatggttttagaaagtcctggtttaaaggaataaaagcggtccgaccttcgccgctgaccgagcgtttgattccgaacgcaaaaatttagaaaatttcggtttagttctttgacaattggatagcgtgttcgggttcaagctgaaaagagcatctgtccggaagggccactccgggttagggcagacccggctcttgggcctccttggtcttttggctctggaggaaacctttcggcgcgtcgaaagacaagatgtgagcctatttaaaattcatctatttgaactactcagtaagccaccctgaacttctcaactccgttgagacgaggcagatctcctttgggctcaaaatcttgagtttgtttcagccaccctgaacttctcaactccgttgagacaggcagaggagggatagacgatggatattgacacagtttcagccaccctgaacttctcaactccgttgagacataaggtttttaatgccattactaaagcatacttagtttcagccaccctgaacttctcaactccgttgagacctaagaatacagtctcctcggccaagcaggtgatgtttcagccaccctgaacttctcaactccgttgagactctatgactacgttgaattcagaacgggctattagtttcagccaccctgaacttctcaactccgttgagacaagcaaccttaacggacgcaaagggaacataaaaagtttcagccaccctgaacttctcaactccgttgagaccagttaggcgaaccatgggaactcatacgattaggtttcagccaccctgaacttctcaactccgttgagacgacaaataatattacatcagctttcttacctcaagtttcagccaccctgaacttctcaactccgttgagactgctatccaaaattcatgagtttttaagcgtagatggaggagtgtttctgcgaaccttcccacacacttctaaagatttatcgcattcattcgtcagcataggcttaagaggttgatgttacttcttaatttaaaattgcgaacctacggggcttctttggtcactaacagttcgcacaccaatgcagttattttgtcttaaacattgttatcttcttttttccttagagtaaaggcatcaaaattaacaataagggactggcaggaccacgctcaacactcggtggtctacactggtagaggacggtagaaggtttacagggaggcaagagaaaatagaaagagatagccacggggcagaagactatttagccttgtgcaaggaaaccgtagagagggggtagaggacgcataagatttatgggaacttcaggccaacttagaaaagtagaaggccgactaataaaggatttggagaaaactactattcccttcttgcagttggcgaaaaaatacggagtgagcaagcaagccatttcccgttttctccaccggaaggggatcaagaggcccaagagagagcacacagaaaagtgttcaatctgtcagcgactgatcgggatcgccaagaagcctcacagcgactttatatcctctcaaacgatcaaaaaacagttaagaattggaaaggtaaaatggatttaccatatcggcattcttagaaggaaggggcttgtctctcagaagttcgggagactgcgttccagaaaggcggagcaggcttatcagatttattttaagaaaagacttcccgtcaggaccatagggaggcaagcgggacttaaaaatttctattcgatcattagacagcataagggtttaggttgggatgttcctgcccctctttttacctatgactcaaacgatcgaagtaaggccaagttaaagatgactaaaaaaaagagaaggggtagctatgtataaaaaacgcaggttaggctcagaccctttggagtggataagggacacagagaatacgtggaggattggggagacctggagaaacagatatggcagtagaacttgatgataaacaagtcgtctcctttgaagaactcctgatgtcccaggtagtctgataagagtcccttactatgttttaataattggagtttaagatggattttaatactgaattagaaaacctaaagttacaaatgaggatcgaaccagaaaagctttctctctccttggagaatttcatcagggaatatatggaaagattagaaagggaaggtgtgatcttgggcctgagtgggggaattgactcagcagtggttgcagcattgtgtaaaggggcagttggttcagggaaaaccttggccctcattatgcccgagaaggactcagaagaagaacacgtcaaagatgctttgaattttgctaaagagttaagcattgaaacaaaattgattgacataacaccctatcttaaaagattaggtgtgtataaattagctccgctcaataaaattcctttcttggggaaattaagggcacccttgatcaaaagagcctatcaattctataagcgaaggacgggggagacccctttttctgccagcattctcggcttcagggataaagaatttagcaattttcttaagaaaaggaatgcctattatcggtcaaaacataggctaagaatgctattgctttatctttacggagaacttgagaacaaattggtagttggagccgctaataagagcgaatatcagattggctactttgtaaaacatggatgtgatgatgcaaccgatataatgcctcttttgaacttatataaaactcaggtgagagaccttgctctatatttaaaaatccctcctaagattattgaaaaacctccctcacctgatatccttccagggattaatgatgaagaagccatagggatttcttatgaaagattggatttgatcttattggctttagaaaaaggattggactctcctgaaacagctaagtttttgaaaataggggaaaaagaatacgagtatgcaaaaactttaatgcagaagtcggagcacatgcgaaaaatttatgcacctaaagggaacatctaaatacaacgctgagaatctgctcataatccataacaagaaattggcttcgctgtacatcaagaattggcaagaccatgctcaacattcggaggtctacaggggaagagggaagtaaaaagattataaattcttgaagggtgttttgagtttggaagtgatgataaaatacttcgcccctgaacttttatgctgaagcgagaattaatcgagaatttgtgtgatcaaacaatcgaaagagaagaacgggaaaagctcaaggctctccttttacaaatagcagaaaaggttcttcttcaaatagtgaccataaaggtagatcacgaatccgggttgagaagaacaaatggagaacgcctaaacgctgcatatgatcctcagacgaagaccataactatatatgcaatgccatttgatcccaagtatgcgtgctatctatatcatgaaattggacactgtattttttatgaatttcaagatgttgcccatgctgccaaaattgaatgccaaaaaggggagagaaataaacttgaattgtatcattttagctctttgaaaaaggttatctaatcccccttcatccccctttttcaaaagggggaaatattttctcctccctttggtaaagggaggtggggagggattttaaaagatttatttcaaaccgctaaattgataccttgaattatgtttctacgatggtaatgttgaagcatgggcttcggaattttgtgcaaatggatttgaattgttcaaatctgaactgtgtttgaatgagagagaacgttatcaagcaatgatagaatattttgagagaaatgaattttgaaaataatataggagaagtcgtatggcaaccgccctcgatcccaaacaaatcgtttcctttgaagaactcttgatgtactaagttgtgcaacaagaagccctcaccaggttgctcgtggaaaaaggaataattaacaaggaggagtttttggagatggtgag

SEQ ID NO: 95 - DNA, 22142 bp, Artificial Sequence
  Synthetic
gcaacaaatagtcgggcgtttgcgtgcaaaagagcaagaaatcgatcgtgccgcgatcgatgtcgtattcagcaaagaggcgttcggccgccgccacgcccaggtcggaggcacattggtcgggtgcggcgatgtgccgttggcggacgcccgtcttcgcatagatcaggggcatgtcccacttgggaaactgtgccccaaggaagtcgttgtcctcgaccttctcgggcaaatagatggcaatcggcccgatcgcggcgaactgcatcgctaccaacctccacccagaaccccgggccacttctctattttaccatccaccccactaggtagatacaggccggccccgacaatgtcagtgccgcacgagcggcccgctccctagccgtcacactttactccccttccaaagatacaagatttgtgggcccatgaatagagcggaagtacggggcggctgatggattgcgagtggggaaatgccggccaaacggctgccgaatcggccgaaccgttcccccggcaccagtcgaaactcgctctaacaggccaggaaagcaggttgcgaacgcatcgttgtaggacgcgtgaaatgccccgcgcggagcgggacgtgggtggtgtgttgcaggtgccctacgaaattctgccaccagagagggatgttggtgattctaagtcgactccggccattttatcttttctattttgccaagccattgtcaccgcggacgggcctcgtggaacggctttccggcgtcgtagagcgtaacccgtgcctgcagcgcgtcggccagccgctggtcgtgttgctgcacggcaagctcgagggcctggcgggccgtggccgaagcctcgtcgaatcgtccagcttcggcgtatgcggcagccaaggcatccagaatatctggccgctgcctgccaacaagctcgttcgcccgctgggcgcgctcgatcgcctctgcgccgtttcgcagcgacgccaggggacacgttgcctggagccacgctaagtttttctgggcgtccgcgtcgttgggctgcgttaccgctactttcttaaagtggttcaacgcttcatcaaaccgaccctgggaggccaggacggtgccaagattgttgtgggccgccgggctattgggatcgatttcgagggccttccgataaagggatacggcctcgtcgaggtggccgcagtgcgccaaggtgtacccgaggttaacgtgcgtcgtggcattgtgagggtcgcttttcagggcaccgcgcaaatgaaacacagcgtcgtcgaggtggccctgcgcggccaggatggaaccgaggttgttatgagccccggcgttgtcgggcacgatttccagggttttgcgataatgcgcgatcgcttcgtcggcttgtccctgctggccgagaacgaccgcaaggttgtagtgggccagccagcaaacgggattttcggcaatcgtccgcctgcacgccgtttccaggttggaaaatgcctggctttgccgccaggtcagggccgccagcacggccagcagcatgaggcagaacaggtagccggcgcgccgggaaaggagccgccagcggtccaacaggattaccagtccggcggagacaagggtcatgatgcccatgctggccaggtattggtaatgattcgccacgaatgagtagcgcgacgtgtagaggttgaagaaacccagtgcgggaaagagcgtgccgacgaagaatagccatgccgccaacggtgcgcgggcccagcggcggatcgcccacaacacgacggttaacccgctggcggccagcacgaaaacgtattgccaccatcgtgtagaatcgatttgccagcgggggtagacgatggtcaggttcacgggccagagcagtttcccgagatagaaccagacggcccgtccggcgacgagaaaccgctcgatcaacggcaaatcgtatcctggcccgacgcaccggttcagatggatctcccaccacacggttatcattcctaagcctgcccccatgagaaacagcggcaccagcggcagcacgtccgttttccacgacaagcgtccccgctgccaccaaaagatgaccagcaacgctccgggcagggtggcggtgacggtcttgctcaacaaggcgagcaggaacaacagcagcgcgcagaggtaaggcgacttccttcgcgtctggtcaaaacggaaataggcgagcatagcccccagataaaacacgcccgaaagggtgttcttctgctcgctgatccaggccaccgattctgcgtttatcggatgcagggcaaacagcgccgcggccagatacgcgccggggatgcccaaccggtgcaacaccaatgccagcaaaacggcgcacgttgcgtgcagcaggatgttccacaggtggtagccgataggcgcttcgccccacaggcgatgttcgaaccagaaagcgctgtgcagcacggggtagtactgcaccgtggacgtcacgtcataccaaatgcgcgccaatccgcgccacgattgcagatcggcgtgcgtaacatggtcggcatcgtcccagatgaaggtgccccgccaagcgggctgatacacgaagagaaccgtcaccaccagggccaccacggggagccactggcgaggggccagggaccgagcggctgccatgaaccgcattggcgccgagcgtcccaacgcgatgttgtcaggtgcgggcggcgcatccagagattttttgggcatgggtccttacgctcgcggcccgcggccgtgcggccaggctgtcttcgtgttcccgatgacaacaacgctccgcctccggcgatactttcagtctgacacgggcgggccacgaaggcaagcgacgtttgccgccccgcatggtacgcgccgagacggccacaagtcgttacggtaacccgtgttccgaacccgttaggtcggccggcgggcctctctcttcgaggccggggttttcgcggtggggctatccatcaacgcgggcaagcggtcgctacccaccgccgctgccaccggtttaactgtaccggccagatggctgccgaatcggctgaaccattcgcgtgccattggtcgaaactctctctagaagagccaacaaaagacggcggccactggtcgcaccgtggacgacaactaccgccagggaggggacgttgccattcttcagccgactgcgactgttacatcttttccatttctccaagccctccggcgatcgcccactttaccgggcaatttatcgccactgcgcacaaaaaatcgtggagttgaatgtcggcgatggccgccgggcacagcgaatgatcgaggtcgcccatcggcgtgcgtcggctccgggcaacgttcactatgtcggcctggacccgtttgaaggccgttccgaggccagtgcgccgagccgttccctaaaggaggttcaccaactgctgcggggcaccggcgcccgcgtacagcttgtgcccggcaatctctccgacaccttgatccggttggccaattcgctggggaaggtggacgtgttgattgtgcccgccgaactggactctcccgcgtcggctcgcctatggttcttcgtaccccgcatgcttcaccagcagtcgcaggtattcgtcgagcaggtttcgaaaaaaggcgagttggtgctggctattaagccgcgcgaggagatcgaccgcttggcggctgcgggcagtgctcgccgcgccgcgtaacaggcgttctgtggtaggccgcacctccggggcggcagtgcaacttccgccccaactaagctaagctccaactgccgccccgaccatgttcctgacagccgaaggcggtcgtgccgcagcacgtcccccctcattcgacgggtggtgttgaccgcgcgcgaaaagcggattacagtaaatcttaatgtttgctaagcgggtcattccatgcctcgatgtccatcggggccgggtggttaagggtaccaactttctccatctccgggacgccggagatccggtcgaggtggcggaacgctatgaggccgagggggccgacgaactcgtcttcctcgatattacggccagtcacgagcagcgcgatatcattctcgacgtggttcgccgcaccgccgaggtgatcttcatgccgctgtgcgtgggcggcggcattcgtacgattgacgacatccgcgccctgctcaacgccgggtgcgacaaggtttcgatcaactcggcggcgtgccggaatcccgagttcgtccgccaggccgcccgccgcttcggcagccagtgtatcgtggtgaacatcgaccccaaacgagtcgtcaagaacggaacggaattctgggaggtgcacattaacggcggccggatcggcaccggacgggaggctgtggcttgggcccgcgaagtcgaacagttgggggccggcgagatcgtgctgacctcgatggacgccgacggcaccaaggacggctatgacttggagattacccgggccgtgaccgatgcggtttcgattccggtggtggccagcggtggggcggggtgtccggaacacctggccgacgcgatcctgatcggcggcgccgacgccgccttggccgccagcatttttcactatggccagtacaccattgaagaaaccaaacgcgtgatgcagcggcggggcattcccgtccgcttgatgaaagccgaatcggcgaatccctcgctctccgccccttaaccatggctactgccgaccccacacgtcaacgttttgttgccaaaacgcaagagctggaaatcgacaagcttttccgcgcgctggtcaagctcgagggaagcgacttgcacttgaaagtcggcacggcgccggtggtccgcgtgcacggcacgttgcggccgctgaaccgcgagccgatcgacacggaagagatggtgcggctcatctttcccatgctcgaattgcaagagcggcggaaacgcatcttcgacgaggacggcggggtcgacttcgcccataccctggacttggagggcaagcactggcggtttcgcgtgaacgtgctgcaacagatgggccaggtggggatggtggcgcggcgcgtgaacaacgtcatccccgatttcgagcatctctttctgccgccttcgatggccggtctctgcgaatattcccagggaatggtgctgttggccggcgtgaccggttcgggcaagagcacgacgatcgcctcgatgctcgactggatcaaccaccgttaccgcaagcacattctcaccttggaagaccccatcgagttcacctttaccgacgacaagtgcctgatcaaccagcgcgagatcggcatggacgtgaaggacttcggcaccggcatgaagcacgccgtgcgggaagacccggacgtcatgctggtgggtgaaatgcgtgaccgtgagacgttcgaaacggccattcaggccgcggaaaccggccacttggtgttcggcacgatccacgcctcgacggcccctagcacgatcggccgtatcctcgacctcttcccgcagaacatgcatcccgcgctccgcagtgccatggctttcaacatgaaagccattattgcccaaaagctgctgccctcgatcaagccgggcgtgggccgcgttcccaccaacgagatcatgaccttcaatcccacggtgcgcaagctgctcctcaacggagaggacgagaagctggccgatgccatccgcatcaacaaagatgacggcatgcaggatttcaccatgagcctgcgcgacctggtcgagcgggagatgatcgaccgggccacggcgttcgaggtggctcccaacccggaggcgctcaagatggcgttgaagggcatcatgctcaaagagtcggcgatgttgtaatgggcacggggaagattccggatcgacgatttatggccaccacgtcccgcttgctgctcatcgtcgcgatgctgaccgtagtgctggcggcggtggcgggtacattgtccgccgccgctcccgcccccggggcccctggcgccgcgggcgcccccgcccccctccccgccgacgactgggccaacacgccgctgggaaaagacttccgcgggccgggcttttatctcagttggttgaagattctcgccgcctggttgatcttcctgctctgggtctacaccaccgactgggtcagcacggattgccaggagctgaatctgaattttgcccgctggaactccgtcgtcttcggcagcttcatgctcggattcgtgttcctgtggattgttcccttgttctggatcggcttccccttgttgatcgtcgcctacgtggcgccctttgccacctacgtggtcaagcgcaacaagcaagtcgataatgatcggcaggtgctgacgcgggagcatctgcgccactggctggccgagcagttgggcaaggtcggtatcaagatggccgcggaaaaacgcgatccgcgcgaagcgggcgcggcggtgaagctttcggccgagagcgggcccgacgcggcggtcggcaacgcccgcttgctgcaggcccgccagtcgcccggctggaacgcggcgcggcaaatgttgtccgaggcctttgccggccgcgcatcgtcgctgatgctcgattatacgcaacaaggcgtggtggtgcggacgatggtcgacggggtgtggattgccggcgcggaaaaggagcgcgagcgggccgactccgccctggaatcgctgaagctgatctgcggtctgaatccgcaggatcgccagggccgccaggaggggaactttgtcgcggaacacaagtccgttcgctatggggccagtctcacctcgcaaggcaccgccggcggcgaacgcgtgctgttgcaattcgaagacaagaaggtccgcttctacaccttcgacgagttgggcctgcgcaccaagctgcaagagcaggtcatggagctgctcgccacgcggaaggggctggtgctgttctcggccctgcccaccggcggcctgcgcagcacggtcgacgtggcgttgcagaactgcgaccgcttcgtccgcgagttcgccgccgtggaagccgaggagcatccctatcaaacggtggaaaacgtccccgtcaccacctacaaggaagccgagggccagtcacccgtcgacgtgctgcccagcctgtttcgcaaggagcccaacgtcgtcttggtccgcgacctggtcaacgccgagaccctcggtctgctgtgccagcagatcgccaagaacgagcggctgattatcagttcgatccgcgccaaagacgcggccgaggcgctgctgcgggtgatggccctgggggtgccgccggccgagttcgccgaggccattacgggagtcgtcagccagcggctggtgcgaaaattgtgcgatgcctgcaaagaggccttcccgcccacgccgcaaatgctgcagcagatgggcatccccgccggacgcgtccaggccttttaccgcccgccgcagccgaacccggaacagcccaaggagcagtgccaggtgtgcggagccaccggctattttggccgcaccgcgctgttcgaggtgctcaccgtcggcagcacggtccgcaaggcgctggcggccggggccaagctcgacatcatgcggcacgctgcccgcaaagacggcatgaagaacttccaggaagagggcatcctgctggtggcccgcggcatcacctcgctgcccgagttgacacgcgtcttgaagcaatagtgcggagaatgccatgacctcgatcttcccgctcctgctcgtcctggtcctcttcgcctgcgtggcgatgacgtatgccgagggcatgtggagcaacgcgatccgtttgatcaacgtcgtgacggcggccctcttggccacgaacttcttcgagcccgttacccaactgctggaaggctgggcgccgaaggtcacgtatgtcgccgactttgtggtcctgtggttgctgtttgcggtggcgatggcggtgctgcgtaccttcaccgaccaggtgtcgcgggtgaaagttcgcttcccggaacgggtggaccaggtgggcggcgcgctgttttccctgtgggtgggttgggtgctcgtctgcttcctggtgatgacgctgcacacggcccccttggcccgcaacttcctcttcgacggtttccagcccgaacagcgtatgttcatgggcttggcgccggaccggcagtggctgggattcatgcaacgcatgtcgttgggcacgttttgccgctcggccacccccgagcaatggaagaaacaggagttcgtgttcgatccgcacgccgagttcatgcccaagtacacggcccgccgcgtcatagtgcaggcgaacgtcgccgagcacgatagcatctgcccgcccgagcgctaagtttcggaccccttgacccgatcatgcgtcccagcgtccccgacgtccacatcaccgatccgcacgacgccgacctggcggcctatcgggcgttggccccgcaggccgtggcgggattgattttcggactgttggcccccctggccatggtcgatccgctgctctgggccttgccggcgctgggaacgatcttcagcgtttggggactgcgccgcattcgcagccgcaagggcgaattgattggccgcaagctggcctggcccggcctggtcctttcgcttttattcctcgccctcgcacccgccgatctgctggcttaccgctggatgatccgtagcgaggcccggcaattctcggccctctggttccgctatctcagccaggaggagccgcagaaagcctttcagttgtaccagtcgccgcagtttcgccagccgctggacgatcgcctgtgggactactatcgccacactccgcaacagcgcgacgccctcaacaagttcgtgaaactgccggtggtccgcacgctgctcgccctggggcccaaggcccaggtgcgcttctatcagaccgggggcgaaggccgcgaagacgacaacgattgggtcgatcaatactacgcggcgacctatgaagagcagggcgaacggaagtcgttttttgtgctcgtgcacatgtcgcggcaaaaactcggcaacggccaggccggctggcgcatcctgagcgccgagggcggcgtgcggccggaaggctggtgagatcgccggccgttgcggctgcgaagccggcttcggaccgcggcgcaactataattgggcgtcgaaagtcccgaattgtttagccggcttgcccgccgcgtttttcagcggttcgctatggcaatcggagcgcgggcaggaaataccggctttcggtcgccacacgccgttaccggaaaaaacggcgactcgggggattgacattccattccgcggggactacgttcgcggatgcacatagggcgctctttgacaattcgaacatcaggtggcggttgaaaagagccacggccggtgctcagcacccgaggattggacagtccccggcactgcccggcaggtacagagaagcctgccgagatgagaccggcctatgtggtgagtccatgttttttctttgcgagttgaagcttgctcgaaaacctgattcctcttcacccgttgcgaccccgcaaggcgccgccgtgctaccggcggctcgctccgtttcaatcaacctggttcctcttcacccgttgcgacatggaatccggcaaggacgtccgtcggacgaaaggtttcaatcaacctgattcctcttcacctgttgcgacgttatcgtcgtcgagcgagtggccgacaaggcggcagtttcaatcaacctgattcctcttcacccgttgcgacggcaccctcttaaaacccatagatggggccgtctcgcggcggcgaattcgcgaacctgtgcctttggcgggcgtggagagagttcgacgccagagacgcccatgtgcaatccgttggacgataaggtgttacggaaaacgcgaacctcccagggatttcggcatcgctagaggttcgcgggagggcacgaccgatgtcctgtacccttgcggttgatttcggctcgcgcaacatcggcgttgcgttggtcgagcatgcgccggacgcgcctaaccgcgtcctgtacgcgggcacaatcgttgtcgatgccaagccgctcaactcggcagtgcaaccccgggcgatggcccggcgaatgcgacgcacgcgaaaaacgcacgaacgccgtctgcgccggctggcccaggctctacacggcgtcccgaacgcggaccacgtcgttcgcttttgccgccgacggggttatagctacgagcccgaggaggaaacagacgagggtacgcgagcgttgtcgttctcacgcgcggagttttttgacgcgcttcgccgtgaaatccagcagagcattccaatccagcagcaagatcaggttttgcgggcctgctcgaagcatctaaatgagtctcgacgacgggacgccgaacttcggccggcccgattcgagaaccgcggcccgacgaaatgccaatgggaaggttgccggcgcaacgtaccgcgtgccggcaacgacgccaagggccgcttgcagcaggcgctttatgtgtggacgaaaccggtcttcgacgtttctgaaaacgccggggcgctccggcgttccatcgaccattggatcgcggaattggacgcattggcccgctggtatcgcaagacgcgaacgctcgacgaagcggcagcgaaagaagagcgaaagaagatcgatcggcgaaagaaccacgtgtacaagaacctgcgggagcgggttgggagggaatgcactggggatctgatcgagcagttcaaggaaaactggggcaggacctatagccgaaatcttaccgacattgtacacggtgggcagggaggtcgggtccggtattgccgcgaacactcgctccgattcgttgactacttcctcgccggaaagcaaattcctagccgcgcggaggtcttcgagagcgatcttttcggccgcacccagcagattctttttcgccgtatctggcggttcgtggagtgccgtctgctgccgttggcggacggccatatcgaccgggtggtggtcgagcgcgtggcgttcgacgtgttggcaggcaaagcgaagaaccggcgcgaggtccccgaggataaggcggcggagatgtactggcacggcccccagtatggtttttccagccggctcgagatgttcaagaaggagtttgacggtcggtatgcctactgcggccggcagaacgcgattcacgaagtcgagcacctgctgccccgaagccaattcgcctttgattcgtacctcaacattctgccggcttgcagcacgtgcaattcccaaaagggaccacggacggccttcgccgcacggatgagcgttcatcaagacgcctatcaggcttactcggactacgtcggccggctcaaaactccccatttgttccacacgatcaagaaggggatgctaaagttgctggcgcggtccggcaacggtaacgaggtggagaaggaattggggatgttggccaataacctcgtgacgataaccagcacccaaaagggaccgcgcccgttggcccggtttttggccagcggactcgaaggactaacgcagaagccgtgccacgcaagctggacttccggtcgccacacggccctgtatcattcgatcctgttgccggagtatcgtaaagccgaagagaaagaaaaaggcgacctgattaaccacgctgtggacgcgatcatcctcggctgcgacttgccctcggcgacagcgatcgagaatccgcggtggtacgctcgcgctcaagatcttatagcctggcgggagaaggtacaggaaaacggcccggtcctgacaaatggtcttccccaggtggagccggtcgagttgatgccgttctttgaagatggtttgggcgacggatattccaagatcgacctcagcgcattcaactggaaccgctcgcggcagtctggccacaagcttgatccggtgggcgtgacccagaatgggcagccgatcaagccgagcgtaaccgttcacacccccgtagacgcggcgtctcgccgcgtttttcggcgttatcggggcccattcgctcgcacaaagcggcgagacgccgcttctacggtcgccgacccgtgaacggttacgcgtgagccggcaacggaattgctgcacaatctgtgcgatcccgcacgtcgcagtgaccaaatcgaacgaatcgcgcatccggcccttcgtgccattttgcaggcggatccggagcacgcggcagaacgattcgtgttatggttacagcaatcggtgaaggccgggctggcggcggccggaatgggaaaccatccgtcggaccgggcacgagagcggttcttgaacgccttcgtcaattcttccgttgaaaactatctcaccggagtcgcagagaaacgcagagacatcccgcgcgtgatcggcatccgttgcctgaatgccggggcccccgcgatgttcgacgtgagccggtcggatcgcgccggccggatctaccagcgttacaaggcggatcctcggctaagggccctatacgtcggttatcgtatgcgggacgggaagctggaccgctcccgacctgtactgctgtgtgtcaaccaagtttatgccgtcaccgagcggaccagcagcggcgagacgccgttgaacgtaccagccggaagcgcgctgcacggccgcccgcttggctccggcggcaacttcaagaagtttttggccgactggcagaaagcgttcgatgcgttctgcgatcaagccggtatcgtcaaacgtttccgcctcagccagggatgtgtgatcgaaaagaccgacaatacgcgattccaactgcggaacttcacgcgcgacaagccgtggatgaaagggtcgcctttccgggacatacgccgggtttaccgatcaccgttccgctttctggaagtcggttgcgagtaaggtgaagcgtccaccgcctgacaggcggggcggccacgccgtgcgtgacccaaaattacccgccgcttgttagccgaccttgccgccggccagcatcagacgggccaacgtctgggccagggcgtccaatgcatcgcggttgggcagggtcacggtgagccgttgccggcccgacgagtcttcctccacgcattcgctcagccggctgcgcacctgggccaccagcggctcggcgggcggcggcgtttgatccgccgtgaccagctcaccgaggaagctgaaaaccgcgcccaacatctcgccccccgccgccgccagacgatcgcggtgctcggccagccgctccgtctgaccgtcgacctcctcacgccgcgtaacatcgagaggcgcttcgggcttggcgcccagcaacacttccaagcgccgccgcaactcctcgatcccgctcttcatctcgacctgtcttacgcccgattcggcgtccaaggccgccagcgccaggtcatgtttggccgacagcgtcgccagcaggttctcttcgatcgtctcttcggtcactagcacgtacacttgcaccggctgacgctgacccatgcggtgcgcccggccgatccgctgttcgaggatggcggggttccagggcagatcgacgttgatcaccgtgttggccgcctgcaggttcaaccccgtcgagccggcgttggtggcgatgaacaagcggcaacccgggtcgtcctggaaacggccgaccagttgctggcgcttcttctgcggcaccgagccgtccagccgcacgtactccagcttgcgacgcgcgagcatcggttcgatcaggtcgagcatcgtggtccactcggaaaagagcagtgctttgcggtccggctcggcgaacaacccgtcgatcagttcccccaggtattccagcttgctcgaatagccgggcgcttgcttctcgaccagatacgtgctgtcggccgacatgcggcacatcaacaaggccttttgcagccgcagcaggtccatttcggaaatgtacgccttgcgggcgatcatcgtggcggtgcgcatgtgggcggcgtgcagctcgatctgctcgtcggtgggcggaatgcggacgatttcgctggtccgcggtggcaactgctggagcaccgactcgcgcgtgcggcggagcaagaccggccgcagattctcccgcaactgatccaggtttttgtaccccagcaccttgccgttctcgtccaccacgcgatggcgatggaagaagcggaaggcggggggtagccggcggtcgtcgacaaactgcaccacggagtagagttcatccagccgattctccatcggcgtgccgctgaggaccagcgcgaacggggagcggaggcccttgatgacccgtgccgtcttcgattcccagttcttgatccgctgcccttcgtcgaggatgatcaggtcccaggcgacgcgttcgatggccaggatgtcgcgtagcacctgctcgtaattgcagacggtgaaaaaggagtcgttgtcgtattgccgcgcccgctcggccgcgccgccggtgaccagttgcacggtgcgctcggaaaagcggcgaatctcgttccgccactgcgacttgagcgaggcggggcaaaccaccagcacgcggccggtgccggcctcgcgggccagcagctcggccacgccgacgccctgaatcgtcttgcccaggcccatgtcgtcggccaggatagcccgcccgaccccggcggcgaaggcgatcccgtcgagctgataggggagcaactcgactttcagcagttgtttgcggagcgggtgccgcgccgggtctttgcgaatctcggccatccgctcggacatgtgccgctggaacagccggcgttggatcaactcctcggcgtcaggatacacggtaatattgcggcccaaacgatcgagctgggccatgccgtcgacaagccgccgcacgtcgtcgatcggcttgccggccagcgcgcccagcgcgtcgaccagctcggcagggggacgctccgggagttgcagatggagcgtgacctcttcgccgtagaggacgtggacgaaggcctcgcgattgcgatagggcttgcggcgcgccgccgccggaaaacgctgccggaggcggtgcaacacataaaggatgtgcttgcaggtgccgagggtattggtgcgaaaatcggggcaggagcagtacgactgcccccggtcttcgccgcgcaatgccacgcgataggtcttgcccgacagcgcgctggtgatcgtgtaatcggtccacggccgcgccgaatcggaggacgcgagacgaaacttctcggttcgcgcccgttcctggcggtcgcggagggcctgatcgagcaactcctgctcgttcaagagctccagcggccggcgctcgtcgggcgcggcggccaggccgaggatcgtcttctcctccagaacgagcgaaacggccgcgccgatgtgcgcgcagaggccctcgcaggccgtgcagttgaagcggagccggtttttcgccccggccatggccgtaatggtggccacgacgtcccggccgccggcgcccaccccgcggagcttcaagcgaaacagatcgccgcgaaaatagacgtcgcggtcgacgtcgatgtcgtcgaaagccgccccttgacggatcaactgcgggccggcgggccccaagagctggcaggcccgataatgggtcagccgtgaaaggcggtctttgagggtgagtttgccactgtgtttggtcttcgccgtacgtgtcttggtcttcatgacgggtgctcgctggtcctcgcagtgccgtgtaatcgataaatgacaaccccaagagtggggtttattgtcgatgttggccgcccgtccgtcaaggccggcaaaaccggaacgaacgctgccttggttgcccggcacccccttcgcgcccggcaatattttgctaattttgataacggtgcttaccccttggaaggcaggccccggccgccttgacacccccgagggcggccgatatgcttactagattacgagggccactaagttgtggtaacgtaagattttgaagcgtctcggccgttttggtgggtcgagcggggcgtggagaatatcggcgaagcaagcgaaagcgagagcgaatggatcccaacgaactgctgcggatcgtcgacgcgatccaccgcgataagaacatcgacaaggaaatcgtctttgccggcatcgaggctgccctcgtctcggcggcgaagaagcactatggcgaagaggaagaggtcgttgttcagatcgaccgggccgacggctcgatccgcggctcgcataacggcgtgcccatggaaccgaccgagatgtccgagcggatcggcgcgcagaccgccaagcaggtcatgatccagaaaatccgcgaggcggaacgcgacacgctgttcgccgaatacgaagaactgcgcggacagttggtcaccggcgtcatccagcgctacgagggaggggcagccaccgtcacgctgtcgaacgtcgaggcgattctcccccgcggcgaacagatccccggtgagacgcaccatgccaacgagcgggtgcgggccaccgtgtacgaagtcaagaaggcgggcagccgggtgaaagtcatcctcagccgcaccaagccacagttggtgcagcgcctgttcgagcaggaaatcccggaaatcgccgaaggcgtgattgaaattcgggccatcgcccgcgaacccggctaccgcaccaaggtggcagtcagcagcaccgatcagcgggtcgactgcgtgggggcgtgcgtgggcgtgcgcggcaatcgcatcaagaacatcgtcgatgagttgtccggcgaacgtatcgatatcgtccgtttcagcgaggacatgcaagtgctcatccccaacgccttgcagcccgccgaggtcgaggaagtgatcctctgccagatgctgggccgggcgatcgtgctggtgcaggaggatcagctttcgctggccatcggccggcgggggcagaacgttcgcctggccagcaagctctgcggctgggacatcgaaatcatgacgcgcgaggagctcgacgagcagatcgaaaatgccgtggcgggttattcgtcgttggaaggggtggagtcggacttggccgaacgcctggtcggcgagggttttctctcctatgacgacctgtcggtgatcgagcccgagtcgctgatggaaatgggctcgctcacggccgagcaagtggacgtgatcgtcgggcaggccgagcgcaaggcggccgaggcggaaaaggccgccgccgagcagcgccggcaacaacgcgaacaagaacggttggaggcggccgaggcggcggaagcggccgccacccagtcggcctattacgccgatggcaagccggcggaagtcatcgaacaggccgcggaaaccgcggcctcgcctgctcctgccggcgggccaagcgaaatagcttctgcccccgccagcgagccaaacgaaacagcctctgccccgtcgaccggtacggaaccgcagtcgcctgcctcggcgggcgaggcgggccgtgcggaatccgagtcggcggagcatcccgcggagtcagccgatgacgccgcccagtaacggagcctttgccctagaccgcaatcgcagacagctcgacgccacttttcacagggagcggccctttgcccatccgcatttacgcattagcgaaacaactgaagctcgacagcaaggtgctggtcgacatttgcaccaaggcgggtgtcacgggaaaaggctctgcgctggccagcttgaccgacgaagagatggcaagggtgacggccttcatcgacgggggcaaggcaggcgcggcagcggggcggggcgccccgctgggacatcccgaggcctcgaccgccacggctccgcccgttttccgtcgtgaagactacattgctccgggcggcacgactccctccagaattccggtgcttccttctcggcccgagaggccgccgctagcgaagaagaaagcggaagagacgccgcccgtgccggtggcccccaaggaaacgcagcccaaggaaacgcggcccaaggaaaaagaagccgccgtggcggaaagcaaggagcgggagaaggagaaagcaaaaaaagaggccgagaagcgggaaagggaaaaggaacgcgagaaagagcgggagcgggaccgagggccggcgattaagttggcccccttgccgacgatgtcgcggcccaccgtgcggcccaaagcgagcgagcccgccccgcagaagccggacatccggcttcccaaggacgccatccgcgcgagcaaagcgggtaccaagccgctttccgaacatctccgcaagcatgagcagcggcgcattgccgccgaggccgccaaaggcccgactcacgaacaggcgccggttgcgccagcctccgaaacaccgtcgccggccagccgggagcgtccccgccgcggggtgcgcagcattattccgcttcgcgaagaggagggagcggcaaccaccctgggcggccgcgagcagcggcaactgaaacgcaagaaggcggccagcgtccgccgccgcaagccggaagatgaagaagagggcggcaccacttccctgcggaaacgcacccacatccggcgaacgggcgccaacaccgcggcgccgcggcgcgagaacgtgtcgctcgagttgccctgcacggtgcgcagtttttcggaagccatcggcgtgcccgcacgcacgattctggctaaaatgctggaactgggagcgatcagcaacatcgcggctaccctggatcccgacatggccgagctattggccggcgaattgggcgtgtcggtcaatttcacccgtcccttggacctcgaacagaaggtactccagccgttggaagaggaagaggacccgaccaagctgcaaccgcggccgccgatcgtgaccttcctcggccacgtggaccacggcaagacgtcgctcttggatcgcatcatcggcatcgacgtggccgctcacgaaaagggcggcatcacccaacacatccgcgcctaccgggtgatgaaggacggccgggccatcgctttcgtcgatacgccgggccatgaagcctttaccgaaatgcgagcccgcggcgccaacgtgaccgacatcgccgtcctggtcgtggccgctgacgacggcgtgatgccgcagacggaagaggccatcagccacgcccgcgcggccgaagtgcccatcgtcgtggccctcaacaagatcgatctgccgggggccaacgcgcagcgggcctacgagcagttggccgccaacgagctgctgcccagcgaatggggcggcgaaaccgaggtcgtcaaaaccagcgccacgaccggcgagggcgtcgatacgctgctggagactctgctcacggtggccgagttgcgcgagtacaaagccaatcccgacgggcccgcccgcggcacctgcctggaggccgagatgcacgaggaccgcggggtcatcgtcaagctgctggtccgcagcggcacgctgcacctgggcgatgtggtcgtttgcggctcggcttacggtcgcgtgaaggccatgtacgacacgctgaaagtggacgaacggctcgacgaggccgggccttccacgccggtgaacgtcaccggtctgaacaacgcgcccggcgccggcgagctcttttacgtgctcggcgacatcagccaggcccgccaactggccgaagagcgggccgccgaggcccgccagcgcgaactcagcggcggccggccgcacgtcaccctggaaaccctctacgagcggctgggtgaagagagccaggtgcagacgctcaacattattctgcgggccgacgtgcgcggctcgatcgaagccatccgcaaggagctttccaagctgcagcacgaggaggtgcagatcaagatcctgcaggccacggtgggcggcatcaccgaggccgacgtgcacttggcccacgcctccgatgcggtgattatcggtttctcggtcgtccccgacgaaggggcccgcgtgctggccgacaagctgggcgtgcagatccgccgctacgacatcatctaccagatgaccgacgacgtgcgggcggccttggaaggcatgctcaagccggagcggcaggagaaagacctgggccgggccctggtgcagcaagcgttccacatcagccgcctgggaacggtcgccggctgccgcgtgctcagcggcgtcatccgccgcgatgcccgcatacgcctgatccgcgagagccgggtggtcggcgattatcccatcgagtcgttgaaacgcgagaaggacgaccagcgcgaggtccgcgaggggctcgaatgcggcatcaagctggccggattcaacgatatcaaggaaggcgacgtgctggaagcgtaccatatcgaagagatcgcccggaccttttagagactaacgtcatcctgagccagaacgactgctgagcgagcacgccatgtcgtcgcgacgcgttgaaaaagccgccgaagccatccgcggggtcgtcagcatggcgatcctggcggagttgaacgacccccgcgtccgggacgtcacggtgacctacgtcgaggtctcggccgatctgcggcacgccaagattcacgtctcggtgatgggcgacgaaacgcaccagaacttgacgctgcgcggcttgcaaagcgccgccggcttcttgcaggcgaaaattgccgagcggatcgagattcgctatacgccgaaactgagctttttgctggatcaaggcgtcaagcgatcgatcgccgtggcgcagatcctgcaacaagtcctccccccgcaaaaggccgcgcccgaggacgagccgtccgcgccctcggagccggccgaccacgatcttcacgagccatccccatgaccgccgtcagtcgcaccgcccagtttgccaaggtccacaaggtccttaagaagtactataagtcggcggccaccaacgccgggcggacggtgatcgagcacctgctgttcgcctgctgcctggaagacgcccacgccgatgcggccgaagaggcctttgcggccctggtgcacacgtttttcgactggaacgaggtgcgggtcacctcgatttcggagctgtcggaagtgatggcctgcctgccggacccgcgtgccgcagccaaccggatcaaacgcgtgctgcacgccgtctttgagaacacgttcaacttcgacttggaagaccggcggaagaagaacttgggaccgacggtgaagtggctggagaaactcgacggcacgacgccgtttacggtggcctatgtggtccaggcggccttgcacggacatgccattcccatcgacccggggaccatgcgggcgctccacgtgctcgatctggtgagcgacaaagacgtcgccgccggcgcggtgccgggactggagcgggccgtggccaagtcgaaaggggtggaattcggctccctgctccacgagttgggcgccgactttgccgccaatccgtattcgcccaacttgcgggagattttgcggcagatcaacccggactgcgagagccgcttgcccaagcggcggaagccgcctgagccggccccggcgggcaaagcggccaaggacggcaagccgggcagcgccgccgcagccgccgtggaaggcaaagccaaggcggccgccgacgagaagcctgccgcgcggaagaagccggtcgatacgggcgatgcgccggcggcgggaaagcccgaaacggcgaagaagaaaacgccgtcgtccccagaatcaccggtgaaggccgctgcggctgagaaggcgcttgcacgcagcggcgcggccaaaaaacgcccggcctcggaagggttgtcgaaacgaaagccgcggtgaagacggcgagatccttcgctgcgctccggatgacttgggtcgattttccatgaactctgtttccgtttccccccacggcactctggcgctgcgttttttcctgtcccccttggtgatcttcggcgcggtgacggcggaggggagcggggcttcggccgcgcaggcaaagaagccggttgcggggccctcttcgcaacttctcgaggacgttccccagccgctttccgcccggcagccgctaaccaatgccgagcgcgatcacttgca

SEQ ID NO: 96 - DNA, 9272 bp, Artificial Sequence
  Synthetic
ccagaaaatctcaaaaacgtggtgccatagaatctacttatagctcttgacattccttaattattcacctaaatatgaggtgactaattaaggaggggtctccatgtttgcgagagtgaaaaaatccggtctgtatgagtacctccagatcgtccaaaaccggcgggaaggaaccaagaccatccagcgggtcgtcgccaccatcggccggatggatcagatccaagagaagggtgagatcgagaacctggtgcgctccctttcccggttttccgagaaggtccttctgatcctgtctggcaagagcgacgtccgggccgatgcaaggaagatcggacctgccctgatctgcgagaggctctggaaggagatagggatcggtaagatcatccgtcggcttttggcagatcgaaaatttggcttcgatgtggagcgggccatcttcctgacggttctgcatcggctctttgtatccggctcggatcggtcatgtgaccggtggcatcgggattatgtgatcgacggcgtcgacgccctgtccctgcatcatctctaccgggcgatggccttcctgggagaagagatagaagaccagaaggattgtacccccttcgccccgcgctgcacaaaagacgtgatcgaagaggatctgtttctggctcgccgggatcttttcagcggtttggattgcgtcttcttcgacaccacctccatctacttcgagggggagggaggcgagaccatcggcgagctgggccacaccaaggatcaccgtcccgatctcaatcagatggtggtgggggtcattctggacgatcacggtcagccggtctgctgtgagatgtggccggggaacaccacggatgtgacgacgctcgttccggtgatcaagcggctgcggagtcggtttgcgatcggacggatctgcatcgtttcggatcgggggatgatcagcgccgagacgatgacctacctggaggaggagaagatccagtacatcctaggcgcccggatgaggaggagcaaagaggtgaaggaggaggtcctctcccgtgccggccgttaccgggaggttcatccggaaggcgtatccgccaaagacccttcccccctgaaggtcaaggaggtaatcgtggacgggaaccgttacatcgtctgcctgaatgagaaacaggcccggaaggatgctgcggaccggcaggcgattattgcctccctggaggagaaactcaagaccaatccgaagtctctcttgggaaacaagggttaccggaagtacctgaagctggatcgggataccgtttccgtaaatcaggtgaagatcgaagaagaggcgcggtacgacgggaagtgggtgctcaagacgaacaccacgctgacggcggagcaagcggccctgaagtacaaggaactctggcaggtcgagcaggtcttccgggacatgaagtcggttctggacacccgtcccatcttccatcaactggatgagaccatccggggtcacgtcttctgcagtttcctggccttggtcatccggaaggagttggatcgcaggttagagaaggccggccactgtttcgagtgggccgacatcaagcaggatcttaaggccctgcaggagatcacgattgaagacaggggcaagacgctcgccataaggagtgagtgtctcgggacctgcggtaaagttttccaggcggttggtgtggcagtcccgtcgacgatccgggaggtggcatgacgcaaaacacgttgtcaaagagcaatctgtggtgccaagaactttttcaaggcagatatctatttaaaatagtggaactattttttggcaactgttaaagatcagtcttacataaggggatgttataggacccgtttttttgtcatggcacccgcaaaaggaaaagagagcaggctccaggccaaaaaaattccctcattattttaccggccacttttttgatggatgcgcccttttgtttattccgcttcgcgggattcccccctgacgtcccccaaggggggcacagttccttgcgctccgccgtcgcagccgccagggtcgtgccggagcgtcgctccctgctggctttgtgcgccagctacgcgcttttaatccccccttcaaggctcccggaaacggctttgatcgcttcgggacgctcctccgtcgcgatcctcgccctcttcgccgctcattcctgacgggcagatcgtgcctttcaccttgtgccgcggtgtcaaggcaccatccgccctttacacgccctatggatgcaccatttcactattccccccgcctccctggtgatcatcagcccggcaagccgcgcagatcatcacctccggcttcgccggcccgtccgcccccaagggggctcccctgtcctccatccccataagagcgaagcgccgtgatgtttctacgcccgccgctgggctccgaaacattccgccgcaccgctcccgatgaatccatgagaaatgagaaaatgcttgccatcagcggtcatccgatgtagaaagagcagtaacccatcataaagcacgttattctcaagccaggtcctgatggagcagatccactatggttacccttggtgttgattacggtgcttcaagcgtagggcttgccctggtccgcagtgatgagaagggccataacatccctctttttgccgggacgatccgattagacgcccgttggttgaaagagaaggttgaaacacgcgccggtatccggcgattgagaagaaccaagaagaccaagatacaccggctgcgccagcttgagcaatccctcgcccaaataggtctcggcgcagaacaaatccactccattgtccgtttcagcaaccgcagaggttataaatccctttttgatgatggcgtcaccgatagcgatcatgatgaggctgaactgacctacaggttcaccagggaagaattcttcaaggccctcagtatcgaactccaatcgcttattcccgaccttattcagcggcaaaaggctttgtccgcctgtgaggtgatcctgaacaggcaaggactcccttcccgcgagatccggcagatcaagatcgacaaccgcggggcaagccgctgtgcatgggaggggtgcagccgggtgacaccccggtccgataatgccttgggggaagttctctctcagcagctctacaccctctttcagtccacattgaagggtaatcccgacttatgccagaaggtcgaaacggccacccatgagttgcatgaacttgccaaaaggctccgccatgcctcgggtgagtctgcgtccagcgaaaagaagatcctccggaagaaggcgcggaccattctccgggctttgaaagaattgctctacacccctgccgacggtgtcggggacgctgagaaggcttggaaatacatcgaaacgggcatgatgaatatcatggagacccgactcgggagaaaccgctattgccgcgaacacagcagggaatatattcagacgatttgctcgggaaagccgattccttttaagcaaaccatatccgactcggacatcatttccagacgcgaacagatcgcctatgcaaagctgtggcgttacattgaggcccgtatcctgcctcttgccccagcagaggggattgaccgggtcgtcgttgagcgaaccgctttcgacctcctggcgggaagctggaagaccatccagggcaccaccgatcagttcaaggaggagatgtatcagcatggccccatgtacggctttgaaagcgtaccggacatgctgaaggaggaattcgggggtctgtgcgcatattgtggtcaatcctccaacaccctcatcgatgttgaccatattctgcctcacgcggatttcctttttgacagttacctgaacatcctcccggcctgtccaaagtgcaattccgatctgaagcgggatcgatccatttccgatctttcgttggccatccatcccgatgcttacaaggcgtacagcgattatctgaaaaagaagttcagcacccgtcccatgcactttttccattccatcaaaaagggtgttctgaacctgatgcaggacgtaaaccgcctgtgggaagcggaacgatatctctccctgattgccagacagtttgcccagatcgttcaatcccagcgaggcccccgacccttcgcccgttacctctccacaaagctggcagtcaagcagggtgaggctccggaaatcaggttccgcaatggtcgtcacacagccctttaccgccgtgttgcctatcctgattttcaaaagcaggcagagaagaaagaggggaacgtcctcaatcacgccctcgatgccatcctgttggcttcagaacttccggatttataccccgtggaatccctaaatcttcctctgtggcagttaaagaattgggttgcgaaggtgaggtcaagagcccccaaagcaggggatgaaggtattccggtatgtccgggcgggccgcaatatgtcgatggatttgagacggttcacctcggtggttacgtggaagtggagttgcgatccatgctctggaaccagaaggacagcatgacccacaagcaggacccttacggcttttctgaaaaaacagggatgccgacgaagaggacttccgcagtcgatctgcacgctgaattaaagaaggaaaagaatctgtcaaaggtgaaaagccggattgcgctgatccatcacccggcgttgagaaatgctttacaggagagcctttcatccgatacccccggaccgtctgcggcggaagcgctgaaagcatggcttcgcatttctgttagaaacagcttggcccattcccgcttttccaaccatcccggagatcaggccagaaggtccgagctggagaagtttgctacgcaggaagactgtccaatcccgacggtaatcggggccaagatgtccagtatgggtgtccgcggcaagattgacctaaggagactggacagacagacgggtgggatcgggcatcgctatatgacccagcctcccaacaaaggggtcatagtggcctatcccaaacgggaagacgggaaaccggatctgaccaggccttgccttgtctatcacaaacaggatttgtcggtctcatctgaaaatatgagaatcttcaaaccgctgcctccgatcctgtccgatggggtgatccttggaaaaaagatagttgataaaggagatagacgcagggcgcttgaaaaatacctgtcggattgcggctttcacagttacatatacttgacaccgggatgtaccatccgctacaaagatggcactgaatggtttgtacgaaattttgacaccgacgaggatttcaagaagggcagactcaaggaaatcatcggcacaaggcggacgccctttattgacagtctgacgcaattgaaaaccctgtcccaatagggattgaaggtaaagcatcaaacgttctttgacaattcagaagaaatgatcagttccggttgaaaagagcatccgtccggagggtgcactccgggatggggcagtcccggcacttgcgttttccccggcttacgcttcggaaaaaggcccttcggcacgtcggaagacaggatgtgagcccaattcaattattgtcacgtttttttgattcacgaaactgatttcagatggtcgttttgacttgcagacttgttaagggactaatggcttatgtggtggtttcaatcaaactgatttccgatagtcatggcgacgtaaacgctccccaaagcttgcaggctgtgaaatggtttcaatcaaactgatttcagatagtcattgtgacccacttaatcccttgacggttccggctcaaccctggtttcaatcaaactgatttcagatggtcattgtgacttccctcctgtttttttaatccgttcgcggaaccgtttcaatcaaactgatttcagatggtcattgtgacttattttttcctcctcaaacttttattctggcgggtttcaatcaaactgatttcagatggtcattgtgacacaatcaaatggcgctttgcctcaccatagtaatagtttcaatcaaactgatttcagatggtcattgtgacgatcgcgtgaaaaagattgtcacggccttaatcgagtttcaatcaaactgatttcagatggtcattgtgactatctgactgaattgtcaaagaataacgatgccttctgcgtgcctttccgcgaacctccggagatcggcggatttttcggggttctcagggcaagcgtgcattgctgaacacaaccaaatacacatatccacgatgcgacggatacccggaaagctgttgaccaaatggaaggctttttgaaaagtgttgactaaaccgttgaccaagtgccccttaaagtaaaagagggctaaccgatgaatcagctaaccccctgtttctcttatggtgccgaagccgggacttgaacccggacggatttagtccactaccccctcaagatagcgtgtctaccagattccaccacttcggcattcccgtctgacccggaatcgccgcttcgcgataccctgccgacgttgccggaacttacccgttttcaaattgctttgtcaatatcaaaaaagcatatcaaaaaagcatcgggtctttgcgcgcatacagcctacttcgccgtctgcggagcggccggggcctgaggcgccggggcggcagccggggcaggcggcgccgccgggttcggcgccggaaccgttttctgcgcgaccggtttggcggcgccttccatcagcaagctgcccttgtgggaaaccgcataagaaaggctgagcgaggtcagcatgaagatgatggcgaccgcggtcgtcatctttcccagaaaggtccccggaccgctgcttccgaagaccgtctgactggacccaccaaagaccgcgcccatgttcgcccctttccccgcctgcaggagcacgacgaggatcagaacgatacatgcggtcacatgcacaatggttatcagaatctgcactttttcataccccttgaatggtttgatatccgacaagttggacgaaagaagcgacgtccaggctggcccctccgaccagcgccccgttgatgtccggctggcgcatcagatcaacgatattcttcggtgtgacgcttcccccgtagagaatggcgatctccgccgcccgttcacttccataccggccggcgatccattcccggatgagccgatgcacctcttccgcctgcgccggggtggccgtcctgccggtgccgatcgcccagaccggctcataggcaaccaggaagcggcttatatcaccggcggttaaattattcaacccctcttttaactgccgttcgacaacgttttgcatccggtcctcttcccgttcctgcagggtttccccgatacagaagatcggcttcaggcccgccgaaagggcggctcggagcttccggtggatgcgttcatctccctcgccgaagagggtgcgccgctccgagtggccgatgatcacatacgcgcagccgacttcgcggatcatttctccggagatttccccggtgaaggcccccttctccgcttcatggaggttctgggcagccagacggacgggcgaccctcggaggagctccgcgacggcgtggagcgccgtgaagggcggggcgatgatgacctccggctccggcggggcggtgagggcgttccggaggcgcgaggcaaaatcgatcgcctcggcgaccgtcttgttcatcttccaatttcctgcaatgaccgggcggaccatttttctatcctccagatgaacggcggtggtcgtgcggggcggaatatcccatccggaacgcatcaccgctcttgtttccgtatcgggcaaagacccaaacgaacttgccgcggatcaccctgtccggagcgcgtccacgactgccgaacaggggctgtccctgaagtcaaaggataccggccccttcgcggcgatgccggtgatccccttcatcttctcccggcaagcccatccttcgacggtctggaatgacgcttcatgatgaaggaggaaggatcatagccagccagccgatattcgtcaatgttttttattccgttttttattcccggaaaagttatgaattgcaatatttgcaaattcacgttagtctgccggcatggatacaagcgaaaagaccctgcaactgacggccctggaaatcaatcttgaaagaaccagagcggttgtggatatccctgaaaaatacaggattctcctaagtgtcgccaagaaccattacggggtgtcgaagcgaacggaagaactgctcgttgagcttcatcacccgtttgtgaactgggagtaccttcttgtacagctcaaaggcctttccataggcgatttttatgatttcaacacccacgaagatggtttatccgcactgaaatcctttgcagaaatttatcttaccgccatctcttcggccggcaacgaggaggttaaagacaatgccgtccgttattgcttcgaatatctccataccgttctttccagcagcggcaaccttcaggaaagaaacacggccctgttttcacccgtctttcggtctctcgccgatctgtcgcggacgcagagtcatttgttcaagaaatcatcgagttatatgaaggccattgccagactgatgatggagaatcatggggacacgatgcggcatcatgtccccattctggatgaggtcaaccgactcctcttttctgccttcaaatcgacgtatcggtactggcttacgcaacccgatccttcccaatggttttccccggatggcgagacaaaggaagatcgcgacgcctatcgtgagctgatctcacctctttcccacgaacatatccgcaggctgctctcccggctaaaagaccctgatcaacatgcggcgaccgctgcggatcagcttgcaccgtacctggatatgcccgaccatgcgcagatcgcaaacggttatcttgtgattgccgatgcccttgaaaaatcaagcgcctttgagggacgccgttatctcgtaaagctcaattttcttttcaatttgatgagtgtcgccgggctgtcggatatccacaacgcgggcctgatcgagatcaatcgctgcctgggaagggcgttgaaagaagaaagcgatcggaatatccatgatcttgtgcaaaagatattccgtttattgaaaaaaacggtctcacagaatcaataccggagttcgatcctcgattgcatcaccacactggcc

SEQ ID NO: 97 - DNA, 12967 bp, Artificial Sequence
  Synthetic
tagtctgactaagctgtggaaaatgcagcggaggtgcattacccggagatgattaagagccgtctttgtattacaagcaaaggcggttattttgtttttggtggagggatgatgaaagctaaaacaccatgtgaaaacgaccccaattccctttctgtataagagatgattacccttggcattgattacggcgcctcatatatcggcgttgccctcgtggaaaacaccgggaccggcaatatacctttattcgccggcaccatcacaatcaatgcccgtgatttgaaaaatatggttgaaacacgggcagcaatcaggcgcctcaggaagctcagggaaagccttcttgcctgcggcataggcgcggatcaggtcaacctcatcgtccgcttctgcaggcggagaggttataaatccctttttgatgaggacgaaagcgaaacccgcgaaaaagagagcgacctcgcttaccggttttcccgtgaaaagatttttgaaagcctcgaaagggaactcggcctcatccttccggacaaccacctgaaacctcaagccctgtcagtctgtgagagggtcctcaaccggaagggagaccctttccaggaaatccgccttatcaggatagacaaccgtggagccagccggtgcgcctgggagggctgtagcagggttaccccgaggcgcgagaacgccctcactgatcctatcgcccagcagatttataccacatgccaggaaaagataagagaaggaggagagcgggcaagggaaaaggtggacgatacggtcactcagcttgccaccctcggcaagcgcatcaggaacgcctctggagaaggggcaaacaaagaaaaaaaagccctcaggaagaaagcgcgtatgctcctccgggagataaaggaactctattaccagccggccagggagaccctggatgatgagaaggcgtggaagtatattgagaccggcgtcctgaacatcatggaaaagtcaaaggggagaaaccgttactgtagagagcacagccccgcctacgttaaaacagtccttgcaaacgaggcaatccctttcaagcagaccatatcggagtcagacatcatctcgcggagagagcagattacctatcagaagctctggcgctatatagaggcacgggtgcttcccctcgcgcccagcggcattgaccggatcgtcgtcgagcgcaccgctattgacctgcttgccggcagccgcaaaaagattctaaaggcctcagaccaaaccaaagaggagatatatcagcatggacccatgcacggatttacaagcgtctcagaaatgctgcgtaaagagttcaatgggctgtgtgcctactgcgggaagcaatcggattctctcatggagactgagcatatcctgccccgggcagagttctttttcgacagctacctgaacctcgtgcctgcgtgcccccagtgcaaccagaggaagggagcacgcaccccctcggctgcttccctgaatattaacggtgaggcatacgaggcatatacaaactatctccagagcaatatccgcacgcgccctctccactttttccataccatcaagaagggcgtcctgaacctgatgcgtgaccctgaaaggcagtgggaggcggagcgttacctctccctcatcgccagccagttcgcccaggtcgttcagacccagcgcggaccacggcccttcgcacgctatctctgttcacgactgtcattacgccaggacatgaagcctgaaattgcattcaaaagcgggcggcacacagcgctctaccggaacatcgcctaccccgatttcagcaaggttgcagagaaggaagaaggagggataattaaccatgcagtagatgccaccttgcttgcgtccgacctaccagacccgaaccctctggaagcgctcggcttgtctcctgctgatatgcgcaggttctgcagtgccgtcaggcagaaagccccgcttgcaggtgatagcggcgtgcctgagcctcccgcccgtgacttctttgtagagggctttgaatctgttggatccggctatgtaaaagtgaaactcgattccatgtgctggaacaagcgcgacagcatgactcacaagcaggacccttatggctggtcagaaaaatatatgttgccgaccaagcgcaccagcgctcttgacctctggagcgaactggaaaagatgaaagatgaaaaagaagtgaaaaagaaaattcaactcattcatcatcctgctttgagaaacgcattctcagccgccatcagcccggcaaaccctggcaagtcagcggcaggtactttgagggcgtggctgagcgaatctgtgaaaaagagcatccagacgtccaccttctcgaacaaccccggcgaccagcaacgcaaaaaggagcttgagcagttttctctctctgatgagtcccctatcccggcgataatcggcgtcaagatgttcgatatgggtgtgagggggaagattgacctccagaggatagacctgcagaccggcagaactggacaccgctacatgacccagcctgcaaaccgggcagtcattctggcgtatccgaaaaagaaaacaggggggacggacctgtccaagccctgcatcgcccgggtgaggcagaactatgcacttcttcctgaggaaaaaggaatcttcaagggacttccggagagattgaaggagggcatgatactcgggaaaaagaataccatcatgacaggctgggacagggaggttgaccattacctctcagattgcggtttcagcagttatgtcatgctcacggcgggatgtgttgtctgctacggagacggcaagcagtggttcctcaagaatttcgataaaggcaaggaattcagaaaagggaaaaggctgaggaacgtcgttggtatcctgaggacacccttctccggaagaatgatgctgttaaagcctttgacttaggattcataaggtggtaaccctttaccacgctgttctttgacaatcaggaccgaatatcagttccggttgaaaagagcatccgcctgagggtgcactccgggatggggcagtcccggcccttgctgttcccctggtatagcaacatgctccgggagcaaaccttaaggcatgtcgaaagacaggatgtgagcctttttatcatcgagcgattgtttcaatcaagctgattctcaaacagtcattgcgacagatggcctcttatgagattgagtggaagggctcgtttcaatcaagctgattctcaaacagtcattgcgacgcagttcaaacagcgtcccccgcttatttttgggtttcaatcaagctgattctcaaacagtcattgcgacaaaatttgcgccttgcggtatcgctcccgcaaggtttcaatcaagctgattctcaaacagtcattgcgacagagcagggacctcttataccgtctcaccgccaacgtttcaatcaagctgattctcaaacagtcattgcgactgcggttctgatttgtcaaagaaaagcgatgtgtcaacagggtatttccgcgaaccctgttcttgctcaccgctaccaatggcaaaaaagatacatagccatgtcttaaagtgttttcaacctgttgaataatatccaagtattaaatttccgcgaaccttgtatgcgagagcttttgtactaactgttgtataataatttggataattgaaataaggcaataagaggtgtattgaaaatatcaatgaaagttgaagaattaataattcatcttccgactttgtctcttgtggttgataagaaatggcttttaaagaaacgtgattgggctgagtcctttatccctccacgcttaccctggtttgaacgggttgaaaaagatttcaatatcctcaacaaacatttaggtaccaataaacttagaaaatgtttcagaagttctcttcaagatgaaagagttgaaaggggtcaattctttatctttgattaaaatagattctgataaaataattgttgtggagcagtaaatattgacaaagatcaacggtatgatatatggtaataccaggaggtgagaggtgagcacagcaaaagttgcaatatcaatagatcgaaaacttcttgagcagattgaccttctggtacaggaaaaaaaatattccaacagaagccaggcgatacaggaagccctgaaagataaattgcgaagatggcagcaaaaacggttagcgtcggaatgtgcaaagctatcagtaaaggaagaacgtgcattatcggaagaaggtcttaccgcgggagatgatgtatgtcccgaatattgaggggtagcgtatactgggccgacctgaatccagttcgaggtcgggagcaagctggcttacgccccgtattggtcatcagccacgatatatttaatgagcgttccggtacagtaatagcaatggcaattaccagtaaaccacagaaagcaggttatcccctgtcataccccatgaaaaccatccgtttgccaaagccatcctgggtgaaaattagccagatacgaaccctttccactgagaggttggggaaaaagatcggtttgatttcacctgaagaattaacagatattgtggatggtctcttcgaattagtgcgttaattattgattaattcatacactgtctaacagaatattttatggaacaggccctctttgtctcaaaggttgataacctgaaatattttgaagatactgacgaattatcccgcctctatttcggaattgagttctgtgagaggcttatccctgatgcagctgatctgaaaaaggtaataagctttgtcaatgagaagaaaatagatttcacgctggttactccctatgtgacagaagacggcctggagagagtcgaaagactcctcgggacgctggctgaaacaaagcctgggagcgaagtggtgtttaatgactggggcgtgttccaggtgatggatgaaaaatatccgggcctgattcctgtgctgggcaggatgctgaacaagatgaagcgggggccgaggcttttgaatgtgctggacaagatcccggaagagagcgtgagatattaccggagcccgggcattactgttccgaaggtaagggaattcctgcttaaaaatcggataacccgcgtggagtttgacaaccttctccaagggattgacttggagaggacaggggatgagatcaaaaagaccctctatctgccttttgcgtatatcaccaccacccgtctctgtctgactgcattatgcgacagaccggataaggtgaaagaagtgggaattacaccctgcggtcatgaatgccagagatacaccttttacctcaagaatcccataatgattaccaaccttatccgaaaggggaataccatctttttttgcaacgaagacattcctgataatttaaatatgtttgaccgggtagtaattgcgcccgagataccaatctgataaggaaaccatgaaaatcctatcccccttagatagcaaggaagaagtaaaagaattaatacaggcaggggctgatgagtttttctgcggcctgctggaggagacctggcatagaaagtatcctgtcatctcgatcaaccggaggccggcaggaaaaggtcacttccggacctttgctgatttgaaagaagcggtttcgatggcaaaggagcacaatgcccccgtttacttcacagtgaacgagcattactatattgacgagcaatatgacctggtgctggattacgtgaagaaagctgtagatgctggtgtttcaggaatcattctcgcagattacgggctgctcaccgtcctaaaggaaatgaacctatcggtcaagctccaggtcggaaccggaggaaccgtctttaactctcagtcagcaagattttaccagagaatgggtgcatcaagcgtaacctttccccggcatcttaccattgatgaaatcaggaaaatagttgaaaactctccagagatcgagttttgcgtcttcatcatcaattcccggtgtgtcaatgtggacggattctgtacctttgagcacggcctttcggatcaatcgtgtttccccctctaccggaatgcctgtatgcttccctatcatatttccctctctccacaggtcagcgctgaggagcgggatatgggggatatcatcagggagcaccgctttctggagcggcagcacatatgggagacagtgcacgtagatgaccacccctgtggcgcatgtgccctgtatgaattcagagagatcagaattaacggcgtgaaaattgtggggcgagggaataccctggagagaaaggtaaaggatatacaattcctgagaacgcttatagacaggcttgagagagataacctgtccatgattgatttcagaaagtctgcacgggaactgtatcagaatacctactcccgaccctgtcgaatgcacatgtgttactaccctgaagtgatggaaatgccagcctaaaatttgcttgccgcctgtttccgttcatggtaaatttaatttgatattctaataattacttgataattatttaggaatctaactatattccctgtaggagttttctttgaaagagggaatgaagtaccgtttaacagaactgtgcggaagaaggcttgggatctatacaggtgccggcacctctcattcctggctgtggtttgtggatgtccttgagaggatggggcttgataacctcgtctgtatggatgaaggtgacctcaaaaaaggggatgaactgacgaaagtgagcgcactcctcatatcagggggggatacctttgccatcgcagatggtctgggcagggaaggagcaaaaagcatagaacagtttatttctgaaggcggcgtttattttggctcctgcgctggcgcctatctgcctttgaaatcttcaaagtatcccttaaacttcctgaatcttgccggagtaaagatcagcaatctttcaaaacatcgcccctctccactgacacagtcagaaaaattctgcacgccctacgggtgtcactatgtgttccatcccgtccgggacgaagtaaagataagattcacgaatggatactcctcaagggtaaaggaggaaattagcgccccgctctatggcggaccctgcatggaaccatcagaggatgtgacgccgatagctttttatcacggtttcacagacaggaccctttttctggtagatgaaaatcttgcagaagaaacggtgcttggcaagacggcggtgtgcagcaaagcagtggggaagggcacactatatctttccggccctcacctggaacatcccttctatcctgaagccaacgaattgctccttgatatgctgtgtgacggcctccaggagaaacaggtttcttcacgtgctgatcaagagattgaagcaggggttagggtatcccgtgagcttttgaaaggactgagaagagagctgagcggttcacggattatcgccctcgctctggagagggagtctatgtcatggctcatcgggaacaaagtctatgagccggagaagttccgggtgttcattgaagcgctctggaaccgcctcggccttcttgaaaagctttcagataagagtttgtcaggcgaagacgttcagagtcttaccgcctgcgcaggtatggtgagagagaaattaaaggtgctcaagactgagatacaccattcatcagataccacagaactggtggaggatattttgtccggtctgcgaaccctggcatcttcctttatgaatctgtatttcaggttgaaaagacaagaacacaggtaggaggaaaaaagaaatgtacatgtactacgaagcccaatggagcctttatgtcttaaccgtgattaccgtggtgatattcctggtcggcgtttacgctaacgtctatcttatacggagggggaaggcaagaagccttacgtataaattcaatcctggtgccatgctgaaggcgctcatcgttaacgtgatatttcagagcaaactcttaaaacagagttctctccgctggttcatgcacatatcgatcttctggggattcatggggctcctggcccacacgacgtttcttgcatattactcccactttgtgtctcctgattcagcttcggctcaattcttttttaccccccactcagcaggaagactcttcctcgatttctggggagatttctggggaacactcctcctgatagggtgctcgatcgccatttaccggaggtacgtcagcaaagtacagcaactggacaccgttcttgcagataccctggccatttttctcttattctccgttacagccacggggttcttttgtgaagccgtgagatttttgcccttgcccccttcccctgattttaactattcattcttaggatacggtttaactaagatcctaaggttaatgccccagtctactatcaaataccttaaatatactgagcaggtccgcaatcatctcatccttggaatatttttaattctctatataccgttcagcaagatgtggcatatctttgtgagccccattgaagtgcttttggatggatccgaagaacatgcgaggagaatggcatatgagcgataatgaaacccatgaaacgaaagtagaagaaatggaagctaaggtagaaaataacgaagccagaataatcaagatcgacaacctcagcccccggcagatcatggaactggatgtctgcacccgctgcggagaatgcagcgtgtggtgcccggtctatgatcaggataagagagagactgttaatccacgcggcagggcacggtggttcaagaagatcattaagtcacagtatggtcttttcaggccgggaactgtctgggggaagatgctgcgcagaaaaccggtgacagaggaagaaataaaggctttcacgaatgatctctatgaatgcagtacctgcaggcagtgttatgtagcctgtccggtacagattgatacggttgagctctgggagagcatgaggcgttcaatagttgattcaggatacggacccctcgaacaacagaaggccctggccatcagcgtaaagtcttacgataacccatggcagcaaccgcgctcatcgaggtcgcgctggaccaaactggctctcaaagataaaaaggtggcgaaagagcccaaggatattacaaagacaaaggcagaagttctctactatgtagggtgcacagcctcatacgatgtgaacgtgaaagaagtggcgatttctgatgcccatatcctcgaaagggcaaatgttgattacgggatacttggcccgaaagagaaatgctgcggaagcgtcctcctccgtgtgggagatcacgagtacgaaaggattgcagaagagaatatcaagatgtttaatgatctcgggattaagaccctgatcacttcatgtgccggatgttataagaccataaagcaggactatgccaaggttgggaagctcaactttgaagtgaagcacatggttgagtttctcctcgacctcatacgtgaagggaagcttcagttcaaaaaggagctcaagatgaaggtaacctatcatgatccatgccatctcggaagacacagcggagtgtacgatgcgccccgggaaatcctcagggcaataccaggaattgaactggtcgagatggagcgttcaagggaaaattcacggtgctgcggggcaggaggtggcctgaaggcgggattccccgatatccagaatcaaatggcgcagacgagggtcaaggaagcagaagcggtcggggcgagcgctattgtttcggcctgtcccttttgttaccaggggctgcagatcggtatccaggcgttaaatttaccgttgaagatgatggatatcaccgaaattgttaccatggccctagacgaggctgagaaagcttgatccgatatacaacattcttctttgaaatttttaagaataccccacaaatacgtgtggtgtatttttttacgagttatgcggaaagggtttcatagtgtctttgcgaggaactatagtgacgaagcaatctaaaaaaagacatacacaaactgactttctggattgcttcgcctggctcgcaatgacataaggattttaattgtgtcaatgagacgattgactgtttttattttttttatcttgacgctttttcctctctgctcctgtgcacagaaagaggtttctgaaaagaaaatccggcttgcctacatccagaatgacctccaccacctcccagcttttgttgccctcgataaaggatactaccgggaagaagggctggacgtcgagataaccggagccttcagggcaggaccagaggagatgagtgccttctcttcccacagccttgataccgggtatgtaggtgaagcacctatcattactgctcaggcgaacaaggtggctgatgtaaggattgtcgcacaggcaaataaagagggttcagccctggtggcggcaaggaattcgcccatcaagaatatcggtgatctgagagggaaggttgtagcaatcccgggccatgctacgatacaggacgtactcttgaggatggcattgaagcggtcaggaatcaaccctgccgaacttaccattatggtactgaagcctccggagatgctcagtgcattgagttcacggggaatagacgcctttatcgcctgggaaccctatccttccaaggcagtgaccggcggtacgggaaaagtcattctggactcaggctcgatctggaaagaccacccctgctgtgctttgattgtagaccgggttcttatgaagaaccgtgatgtggtcaaacgtctgatcagggcccatctgaaagctgtcagatttatcagagacaatgaaggtgaagccagaaacattggagtcaaatataccggaatggatgagatgacggtacgggaagcgcttaaaaggatcaagttcgatccgctcccttcacggcaggacaagaaggagtttattgaatttctcagggaattaggttatataacaattgagaattctgataattttattgatgagctcatggatgtaagcctgctgaatgaagttgtaagggatgaaaaggttattcaatagatatggactccttctttctttgctctgcctgtggcaactcctatcggtttttcaggtcctgcccgcttataaaacgccatcgcccatcagcgtactggtcggtctaaaacaactctcgactcagggcttgccttctggttaccttctccacaaccattgcctccagagcctctaccgggtatttgctggattttttattgccgctctacttgctattcctctcgggattatcatgggatggtcaaggtcactgagggaatcagttacgccgctgattgaggttctacggcctgttccccccttagcctggatacccctcgctattctctggttcgggatcgggttcaaatcctctgtttttatcattttcttaggatgctttttccctatcatcctgagcacgatttcaggcgttttgtccattgattcaattttaattgatgcttcaaagactctcggcgcaaggaaaaaagagatctttttaaaggttttaactcccggctccctcccttccatactaactggcctccggatcggtttgggtatcggctggatgaccctggttgcggcagaatttaccggcgtaaggagcggatacggcctgggttacatgattatgactgcccgggatattcagagaccagatgaagttatagccggtatggccatcatcggactcattggctatagcctcgatcttctcctgagagggatcgaatcccggctgcttatctggcgctaaaggaagaagacggtaacgtgtccttagagctgattcatctggacaagacatatataagcaaagaagatggaaaagaagtagaagcgttaaaggatattgacataagaatcgaagagggagagtttgtctctcttatcggtccgagcgggtgtggcaaaactactttgctccggataatctccggcctggagaagccatccggaggaaaaattctcatcgacagtcaggatgtggatgagccctggttgcaggttggcctggtctttcaggaatttgccctctttccctggaggacggtaagggaaaatattgaatttggtcttgagatgaaaggaatttccccggaagaaagggggaaaaaggcagcggagtatgtcagttggttcgggctggatgattttggaaaccggtatccaaaagagctttctggaggtatgaagcagagggtggctatcgcacggacattgatcaatgaccctaagattatcttaatggacgagccttttggtgccctggactctcagacaagattatcccaggaggaatttctcctgaacttatgggacaggacaaaaaagacgattctctttgttacccataatgttgacgaagctctttctttgagccagaaggtgattgtgttttcccgaagacccgggacagttaagaagattttcttcatagcgctcgattacccgagagatgtaaacagtgatgtgtttaatggcgtgcggagagagattttggagtatctcactgaagaagggatgtaaagtaaagaaataaaagtatcatgggtaccgatttaaaattaagagaagttgtcaatgatctccagtgcctcggagtgaaaatacgtaagcctatgagtgtgaggagaggcggggcagggcctgctgaaggtcaggtgatcatattcaaagggataccggtcagttgcccggttgcaagcccttttgtgaaagattccccctatgtgataaaacggaatggcgcaggtcatatcctggaaaaaaatgaagaatatatcgcagagattatccttccctctgtcccccgtttctaccagaggaaaacagcagacgggatcccgtattcccagatcgcaa

SEQ ID NO: 98 - DNA, 4631 bp, Artificial Sequence
  Synthetic
tcagaagtgaactctaaacttcccgttgaataactcaacatatccatcctctcatcggtcggttgagtctactgagaccctcggggaaggatgtactttatttattgttgaaatattggataaattgaagatccaatcgattgaggagtacaggaagaagtcctcaggggcgagacactcaatttatgacccctttaaacatccaccctctccaattctcaccccctccaattctcattgacacactgtttgattcttaatacaatcaaatcgaattagaggctatccgttattaacctctaacccagagggtgggatatggtctggagacgtatataagacctcatttctgaaaaaggaatggggttctgttttttgcattggtgattcctaaaagggagatggagacaaaggtaacgctatcaattgattttggttacaaaaacattgggattgccctggtaaggaaccaggagggaacgaacatccccttgttcgccggaacccttctatacgacccttttcaactcagcactaaagtaggtcctcgtgcggaactccgtaggggtcgccgaaccagaaaaacaaaaaggcataggctgaaccgtttgaaacgcgtattattgtcattaaatctatctggagatattattcaacaactccttactttttgtcggcgcaggggatatagctctttattcaatgggaaagaaatccctgaaactgggaagaaagattcagaagaaatcatcttccgttttagtcgggaagaattttttaatgcattggaaaaggagataggaaagctacttcctgaagaaaaaagagcatccgttcttgccatatgcgaggatatacttaaccgagctggtgacccatcaaaagaagtccgaccactaagaattaacaaccgaggagcctcacgatgtgcttgggatggatgtgagaatgttaccccacgccgtgataatgccctcagggcccccctatcgcaattcattcatacagtctttgcgtcaagtctgagagggaatacccaattaaagcaggaagtctcaaccatgctggaccgtatcaccctattaggtaaacggcttcggcatatcgggggacttaatccggataaagagcgaaaagttttgaaaaaagcaataggtgatgaactgaaattgttgaaaaatctatctggtctaagccctgattccgatgaagaagctgccaccccttggacacggattcgccgaaatataatgaacctaattgaacagacaggaggccgcaaccggttctgtcgtgaccatggttctcaatatgtcacctattttctggagggaaaacgaataccctttaaggcaaccttaactgaaagggatttagtatcacgccggcaagaaattctttttcaaaagttatggcgctatattgaggctcggattcttcatcttgcccctgacggcattgaccgagtgatagtggagcgcacggcaattgaccttctggccggaagccgaaagcagcgccaagacataatgaacaaagaggctcttgaggagatgtatcagcaaggacctcgatacgggtttaaagataacctggaaatgctcagaaccgagtttggggggctttgtgtctattgtggcaaacaaaccaatgaattggtagagagagaccatcttttgccaaggtcaaaattttttttcgatagctacctgaatcttgttccctcctgccctccctgtaatcgaacattgaaacaggcggcctcaccaggagaagccgcccttaggatagataaatcggtataccaagcgtttgctcaatacatggatacgaaatttaaggataaacctccacatctttttcacaccatcaagaagggtatcctcaatctcatgcaggagcctggccgcatctgggaggttgaacgctacctcaacctcatcgccaaccagtttgcacaggttgtggggactcagaggggaccgcgccccctggcccggtatctcagcgggaagctatatcaacggtttggggagaaaccccagattggatttgtcaacgggagacacacagctctttggcgaaaggctgcttatcctgaatttgataagtttagagagaaaaaagagggtgggattatcaaccatgccctggatgcacttctgatgggttgtgacttgcctgatttgaccgcacttgaagcgaggaatttgcgccctgacctgatgtcttggtgggttgacaaggttaagaaagcagctccacctgaaggccgagagggaatccccgtgatacccgaaccacggtttgtagtagctggttttgaagatgttctccctggaaactatatcagggccgatttggcaaagatgaactggaatcgtaaggattctcagacccaccgccaaaattcctatggctggtcaagaaaggaggacatccctgttcagcgtttgaccgctgcaagtattgcaaaagaccttcgcaaggctgacaaagaagcctctccagaattgaggagagccgaggtcaagaaaattgtaaataagattatccatccaagacttaatcaaaccttgagagaggcaaatattggcgacaatcctgggtcaagcacagcagaagcacttgatgcctggttgcgaaaagcgattaagggcaacttacaagagacccggttttcctcccatcctggcgaccaacgcagagcagaaatacttcatgattttgttgctggccaatttgatggaatccctgtagtcattggagtccaaaccctataccgctcccgtaagtcaagtgttgatttaaatcgggttgatactaaaagccgcgaggttttacaccgatatgacgctgaccctgcaaatgtggcttacatagtggcctaccgaggaaataacggtagggtcaaacgggatagaccattgactcttgaatggcgacagagcggggctgtaatccccaatgtcaaattgtttggagaagttcctgaagggccattaaagggacgcgccttcggtgaaaaagcaattgaccaatcaaaatggaaggcagctttgaatcaatatctcgccaaggcaggaatagctgaatataattttgtatcgcaggggaatgtggtggtttgtgaggatggtagtgaattttatattaggaatttttcgggcaactacggttttagaaaatcttggttcaagggaataaaagcggttcgaccttccccgctgacacagcgattgattccaaacaaaaccgtttagaagctgtgattttgttctttgacaattggatagcgtgttcaggctcaagctgaaaagagcatctgttcggaagggccactccgaattagggcagattcggcacttgggcctccttggtctttttgactctggaggaatccttccggcgcgtcgaaagacaagatgtgagcccgtttaataaatttttatcttgaacttatcagatgtgtctcaaaaaaccaccctgaacatctcaacttggttgagactcctttctcctgtgattttactttatatgatgcgtttcagctaccctgaacatctcaacttggttgagacggctatccaaaattcctgtttctttaaccgaagatggaggtgtatttccgcgaaccctttcttgaagggcaattattctgttagcctcttttgaccgtgtgattctaacagtctgaagttcctataaattttgaaaacgcggaccttcccgctttctcacaccgttgctcgttcgcgttcaaggcaaaacaccaatgaataagttcttttaggtaagaaaaaatattatggcaatccccatagaccctaagcaaatcgtttcctttgaagaactcctcatgtcccaagtcatccagcaggaggctcttacaagattgcttgtggaaaaggggatattcagcaaggggggggtttggagacggtgagggtggcgaagaaagcaatcgagaaagacccagaggtctatagtatatattataaacccgaagggaaaggacatggtatcgggcagacaggcatttccaacttcctcggtggtgcatggaaacggccttatcaatctcgccttattattaaagccagccattaaagagaaggcaaggactcttcagggaactcggacagacctttctcttgggaaagggaagggtagtgcctcttcccaaaagccactaaagcatgaacgtttgggattacctgtcaaacgtatgcaacacgctcaaaccatttctcgccatcccgaaattgtgaagaaggcaaaagcgcatcagggaactcggacagacctttcgttgaattcatcgaaaggttctattgatactcgcaaggaagtagcgaaggctgcagacggatgatggtgcgataagttccaggaatcaaatgtatcaccgtgttacatttctcttctgtcctgcctgtcgcaggcagacgcagggcctcaccccctcccatcgagggaggggtaagggtgggggctggtcccatccataggggaggatagagaaaagagtttgtagcgcatcctgagcatgattactttaggtgcctaaaggcgatattattcgatagcaaaccatatcactcctcaacatgtaagactctattatcata

SEQ ID NO: 99 - DNA, 22198 bp, Artificial Sequence
  Synthetic
ctcttccccggttgccttttcgtctgccgccgaagtaggcctcatccagctcgatttctcctcccaggaggtctttggcatcttcagcatggctcaagatacacatgcggatggtgttcacggcgccatatacggccttataagacattttcatctgcctggccatcttgtggaccgatatttcaagctcaaagagcttgatgagagacagccattgaatacagctcagacgcccatggttgatccagcggccggagaagtcacggaatgtgtaaaagcatctggagcaacgatatcttccgtcttctaacttgtaaagttttctcatgcgacaacgaggacagaatctctgatggttatggaagcattttcccaacagatatcttctggccttgctctcgcttgagattaagtcatagtaagtatttaagtccatatggcacccttatcacaggtgccagaacggtatcaattaccaaaaattttcctgttgatttttcatttgatcaaaatcattgcctaagtcggataaatgatgaagcattgtgaagcctatctgtcaaaatatgaaatcatggaaaatctcggcatcttctgtgcctttatactcggaattaaaacataaaagaagcagggtgcaaaatgatacgccttggctgtttttgtcacaacaacagatatctttgacggattccatgaattgactatttacaggagggaataatggaattaaaaggggttatagaaaagtttcggtttattctggatcattccatcgacgaaatttgcattgttgacgataagggaattataatttatatgaatgctgcctgtctgaaacattacggcaaagatccttcgtattttgtcggccatccagcaacgcgcgccgaagtagaaggagtcgttgatcatgcaatcactcccttagtcttcaaagaaaagaagaaagtaaccattatccagaaaacagccatcggacgggatttgctcatcacggctaatccagtctttgatgagtcagggaatattatcctgattatagaaaatgtgcgagatatttctgaaataagagatcttcaaaaaaaactggaggaaactgaaaacttagttaaacgttattcggaaaaactggaatcgctgaaaaaagaacagcccaagtttgaagggatggtaatcaatagtgccaagctgaaaaatatcatagaaatgatagaaagaatcgcaataaccgattcaacggtcatgatccttggagaatcgggaaccggcaaagatgaaatcgctaaaataatccattcattgagcaaaagaaacgaagagtcttttgtcaaggtgaactgcggtgccataccttcaaccctcatagagtcagaattattcggttacgagggtggcgcctttacgggatcaaaaagaacagggaaaaggggtctaatggaatctgccagtgggggaacgttattcctggacgaagtaacagaacttccatttgatacacaagttaaactactccaagcactccaggaccgtcaattcattaaagtgggcggaacccatcctgttctggcggattttcgattaattacagcaactaatagaaatattgataaactggtaaaggaaggcaaatttcgggaagatctcttctatcggttatacgtaatcccgattgaagtccctcctctgcgagaacgaaaggatgaaattatacccctgttacagtactatgtcgattattttaataaaaagtaccatgtcgataaaagcttttcattccaggctgtatcgctgctccgtcactatgactggccgggcaatatccgtcagctaaagaatgttgtggaacgtctcgttgtcacagaaacggaggacataatctcgtacaaatcggtgctgtccgcagtcgggaatacagaagagatcctgcatataaacaacaaaacaaccctgagagatctcatcgaggatcttgagaaagaaatgatcatccaatgttataacgaacacaaatcaagttacaaagtggcggccctattgggccttagtcagcgcacggccctcagaagaataaacaaatacattggctccatgcgcacccaaaaatagaacaaatattagcaggaaaatacctcctgacttttggaagcaatcaaaaatacaagaggtcgatatgatcaccgaccaggagaagcttataaggtgtttttcgatttctacccgtaagatttattctcgtttgagattaagtcataatgagatgttagaaccattctggcatcaccatggcaggaggtgcaagaatggtatcaatgaaccagtttaaataatccctttttccgtaaattcctcgatctttttctgatcaattccaatcgatcttagtatttccacattgtgctgacctaaaagtggtgctgatgatgtcactctgcccggcgtcccgaacatcttaatcggaacgcctggtactctgataatgccaagtagaggatcttcaacatcaatgatcatttcacgggctttcgtattagggtggttaaccacctcttcaatattaaggacgggcgcgtgaggtattcccgctggtttaagaatttcctctaattctgctattgtatatcttgctgtccactccacaaaaattggtttaagcttagtaaaatagttttccactcggagacgcgtagtacggagctcagagtcatctatcagttcctctttacccatggttctgcacagattttcccaaagcttctggtttgctgcagcgattacgatatatccatctttgcattcgtacatatcgaatggtgcggtataaggatcaatattaccaacgcggccgtttatttggccatttaatgtatattggataatggctgcttcgagaatcgatacaatcgtgtcggtcatggccacttcaagttgctgaccatatccagttttttcacgacgatatagtgccatggaaataccaagggcaagataggtaccagtgaaattatcgccaatggcagggccgaccttaacaggtgggctgttcggggaccccgtaatgctcattattcctcctaatgcctgagcaatattgtcatatgccggtcgatcacaaagggggccataagatccgaaacccgaactagaggcatagatgatttttggattgatatttctcagtgtttcgtatcctatgccaagtttttccatggttccaggcttaaaattgttgaccacggcgtcagccgtcttgaccaactccttaaaaatgaattttccttcttctgtttttagattaatagttattccttttttattacgattcaggaaagcatgatacccgcttgcatcatttttaaaaggaggccactgccgcacttgatcacccaatcccggatgttcgatcttgattacttctgcaccatgatctgccaggttcatggtgcagaatggaccattatatgcgatggtcagatcaaggaccctgatcccctcaagggatccgaagggtgttttattttcacgatcgcttattttaatttcttcttgactcatctacattcctccctttttcatgtaaaataataaaagtttggttgcttgattagcaatctatgtgccacctgattaactcactgattcctttattaagagcgactgttttttaaagacttcaacttttaaattcgatgtaatatcggctcattccatgaatatgtaaaaataacggaatttgatgttaagtggggcaaagaaattgtgttcaagttttttgaaaacaaaagactggcgtatggattgtaaacagggaaagctgaggaagcacatcataaataagccatcatggcttatttattttataagtaagatttagatgacaggaatacaatgtaaaatagtaatttacagttgagcttatttgtacaagccatcatggcttatgctttttgtaatcttatttctaattttcattatgacccgcgagtcactgaattttaaacaagccattatggcttgcttaaataaagctaataatttttacataaattaacttatggattaatcctgcaattcctgctttgcatttccattgaataatcgaagcgtttcagtgttgctttgccatttagacagctgcccaccttgaaaatcttttaaaaaatctctttttcgcatgttgatcttcgttctttcatgaccttgccagactaaatagctttttcttgttatttgttaaacatattcaacgtgtgtccaatatagtagcgggatcataatataatggcaccttaattgcagaaaggttgctgaaagacaattgtattccctgtaccaagagttttaagtgtcgactcgattaaaatactttaaggaggaaatatgattcaggattatgtagaagaaaacacaggctggatagttctcaataatacgaggagaaagaacgccctcaataacaaaatgtataaaagcattttagcgcttactgaaaagtatgaacaggatgaaacaattcgaaccattgttttgaaaggaaatggtgacaatttttcagctggttacgacctctctcaaggattacccgatccatatcgaaattttgtgaaaaatatatccggtcctaccttatggaaactctggtattgcagaaaaccaacaatatccatgattgacggatattgcgttggtggaggattcgaactggctatggcatcagacctggtttatgcatcagatgatgcttctttgggagagcctgaaatagatttctttttcactccagattttaacacgattccctgtttcatccttcctcgaaaagccaaggaaatgatttttttgggaaccgttatatcgggaacggaagctgcaaaaatcggattaataaacaattcgtttccaaaagatattctagaaacagaagtaaagaaggtatgcagcagaattgccagtttacctgcagaaaccattgaagtggcgaaaacaggtttaaacggagctttagatttattaggttttagaaatgctgtcatttatggagaagaaatggccatttataatggccttctgagtaaaacaaatccaaaatgtgcacccttttatgaaactgcaaaagagaaaggagtcaaaagcgcaataaacatgatgcgagattatagtcaatccgggatttctgatcaagacggctggaaaaaaagttaaaatacggggataggagggcaagattatgattttaggcgttccgactttgacatttctctttatgttggcatttcctgttaccacaatcgttttatcactgatctacgtgttttggtactatgagaagattgagcgtcctgatgaagacatcaaattcgattagaaaacaccaatgaacaaaatgcagaattttaaggaggaaggagtatggaaggagcgggagttgaacttgcaatggcaaaagggtggcaaaccggtatggttgtcattatttatatattggtactgctggccattggaatatacgtttcccgaggaatgaaaagcgcaaaagacttttttattggtggcgcttcaatcggaccatggtttgtagcgttttcagctgcggcaagttttatgagcggctggggattcgtcggaggaccagggcaaatctatcaaaatggatacagccctatgctggtattggaactttttgctcttatcggcatgggactcagttatttccttgttgctgtaccgatacgaaagatggtgaaccagtataagatccttacaatcccagacgcaattcgggcaagattcagcaatgaaagagccgctaaagttattgcccttggtatttttatcggtgtcttcccatatatgctggcccagtatctcgccatgggatatatcggtcaaaccgtcttcgggttcgaattctggcagggctgcctgatcggtgttgtcattatgatcgcatattcaaccctgggcggcatcaaggcatcaatatacagtgaatttttacaagcatctcttatgtgtgtaggtgctgtggccatgttgattatgggacttaaagtctgtgggggatggacaaactgtttttccactctttcgagtattccagagtatatggatatattcaagagcagcttccaaggtggtggtagtgcctggggcatgctgtcatgggcgcttatgttcgggcttggtgtttcatctgcccctcacgttatctcccgcttttatgcgattaaaaaagccagctatttgaaacaggccttggtcgtctccctcgtagttctattattgtttgattttgctgagtggtcagggttctggatgagatatttagttgaggtcggaacggtgccacctttatcaaaacctgacctcgctgggccaacttttgtcatgtttacattcggttcagtcggggctggattaatggtaggtgctattttatcaggcatcatgtcaacggttaactccttcatggtgactgccacatcgactgtaatccgtgactttatcaccccatatttgaaaaagcaggggagagtgttgacagcaaaacaggaactctatatctcacggtatggaatggttgtcgtggcactaattccccttcccttcatatttaatccgccccagcttctcatgtggattgccgcggcggcatggggaatctgggtggcaacaatatttccgcccctggtctttacccttcggtggaagagaaccacaagcaacggcgttttctggggtgcgactatggggcttagctcgagtctcctattgagccttctgaaagaattcgccaatattcataccgtaatcgaacctggagcctggggtatgataattggctgtacttcactgatcgtcgtttcccttgttggggttaaggaaaaagaaacacatcaaattattgatacgatatcggagtcagtcagtgagattagacctttgccaatgagaccagaacctgttgctgtcgtagttccatattcagaaaaataaaatatgctctagagggtgtgaagaaccgatacgttgattatagtgttctctaaatatccggaagaactcatgataaaaaactgtgaggtcttccggatataattgtgtaagtgaaataatacgatcaagaaagtggtgtaagaggacgttcacaatttcaggtattgtaggaggcatcgatatctcctaaaatggtgcttgctgaaacactaaaaaaaggagacagagtgatagccaaagctggattaccgaatatagtcttcaatcctcgcgagaattgcagccatgagtattacaggaagatagacgtaacaaaagctgcctttacccccccgcagaaccgcctcatttgccctacaatcaattctctcaatcacagggcatgaagaccttcaccctgatgaacatttttggaattagctcctatttgatgaacagtccaaccgactgaccatatcataccgaaatatttaatcaattacgaattatcctcttgactttccgtaaagacggcatcaaaataggatcatcgacattacgttcatcattgaggtaaccaagatgaccaactcaatacaaaatacgccttttcttttgagttcggcccatttaagtgcccaagatgacggtttttccgtcccaaaggatatcagaaactcaatagaaaactttgtgaaagagaaaggaggtagcggatgaagtcgaaaggctcagaaaacatcgtggcttttccttttgcgggagagcagaagaagcagaggaaaaagcgcacgaaaaagaccgttgacaggatcaagtatttcaatgtctcacagatacgccttttgagaagggctgcaagggaacaggcggaaatggatttctcgaaaggccgcattgccggtattcgggaatggatggtgatcgacctcctcacctcgacgggactcagggtatccgaagcagccaacctgagatgtggagacttaaagatcggatacggggaaagcaggctctttgtccgtgaagggaaaggagacatttccggtcatatcgtgatcaacgaatccctgaaaaagcatctgaagagttttctccggtggaaggaggagagaaacgagaagaccgggaatgacgatcccctctttgtcgggcagcgtggcccctggacagctcaggccattcagcagatcgtgaaaaaatacctgaaggatctcaacctttacgaaaaggggaagtccgtccacgccctcaggcactcctacgccgtggagctttattcccgtgggaaggatctcaggacggttcagaaacagctaagacacgtttcaattcaatccacccttgtctacgccgatgttaccgacgaaacgataggggaacagataaaggggctgtggaactgataggaggggcatacaatgacggataagaagaaaagagacactagggcaaggggtccacagaaagaacaggatcagctgaagggaagcgagaacaaaccggacaggctgaacatcggcataaaggtggacagatccctgtggagacggttccgtgccgttgcgatcaggaaagacgtaaacgccggggatctcctcgacagggtcattgaagactacctgaaggagcatgaatacgaaaaataggagaagaatgaatgggaacacaggaagtgctgtcaaacattgaaacagccatcaaccgcgtctgcaaggacatcaccgggaagaagggaatgacgggaggggataagctcgactcattgtcgaagctcgtcaactcatacagcaggctccttgaaaggggccagaacgtctcccagaggaaggacgaggaggaaggcgatcccgactactacaaaaaccagagccagcaaacagttgagaggagagggctgatccggtaaaggggtctcccccttttgtagcaagcagactcttcaaaaaaacgtctttttaaacgacaaaaccccgccaccaacaagcagaaaaatcaaacatactacataatccgtagcactcccaatgacatgagacggttttgtcgagtgacctacccccccccctcgactaatccgtcgcattcaacggtttttgtagagtggatacttgaccacaaattttttcccaagattttcaaagagaaatattttattgcaatttcaaatagctttttttaaacataagtcatccatcgttattatatttgttttccagtcagtagatagaatacgacttagagtcaaagaggatttcaatatcaaagaggaaatatttgtaaaaattttaaaaaatgcgcctaaagcctttcccaagtattttatagtaaaaacgattttttcaggtgcaatgagtttatccgtcaacaggacaggacaatgaagaaatgataactctcggcatagactacggagcctccaatataggaatcgccttggtcctgacaaccgaggctggtgaaaatattcctttgtttgcagggactctcagagttgatgcgaggcatctgaaagagaaggtcgagacccgggcaggtatcaggcggctccgaagaaccagaaagacaaaaaaacgacgtctcaggaaccttcagcacgcccttgaatccctcggattatctccggaccaaacctcaaaaataatcagattcagcaagagaagagggtataaatcgcttttcgacaaggacacccctgatgaaacgaaggatgacagcgagttaacctaccgcttcacccgtgaggaattttttaaatcccttgaaaaagagttatccgaatggatttcagatgaagtaaagcgagcaaaggccctctctatctgtgaaaaaatacttaaccgccatggcaaccgggaccatgagatcagaaaactccgtattgataatcggggagtgagccggtgtgcctgggaaggatgcagggccgtaacacctcggttggaaaacgcactcaaagaagccctgtcacagcagctatatacggtatttcaaacgctggtcagagaaaatacagccatcaggaacgaaatagacgaagctgtagccaatctgacagagctggcaaagcggctccgtaatgccagcggtgatgacgccaattcagaaaaaaagatccttcggaaaaaagctcgttccgtactgaggcatttgcgagacaggttctttgcgcttgatgaacccggccttgagaaagataaagcatggaaatatattgaatcgtcgttgatgaacactctggagaacaggggtggaagaaatcgatactgccgttttcatagcaatgaatatatcaatacgatcctccagggaaaaccggtcccgttcaagaaaacaatagctgactcggatatcatctcaagacgggaacaaatcgcttacgcaaagatttggcgttatatagaagcccgccttcttcctcttgcacctgaagggattgatcgcatcgttgtggagaggacggctttcgatctcctcgccggaagttggaaaagtattgcggatgccaccgatgccttcaaggaggatatgtatcagcagggaccgatgtacggtttcagttccagaggagagatgctccgtgaggagttcgggggactttgtgcttactgcggattgccttcatcggttctcatggacagagaccacattcttccccgggcggatttcttttttgacagttatcttaatatcgtcccggcctgtccaaaatgtaattcggcgttaaaaggcagacgaccggcttctgagatagcattgacaattcatcccgatgcctacaatgcctatgatcattatctcagaagtaaatttaaaaaaaggcccatgcacttcttccacacaatcaaaaaaggcatcctcaatctcatgaaagaccctgaccgcctttgggaggctgaacgttacctttctttgattaccaaacagttcagccagattgtccagacacaaagaagccccaggccattcgcaagatatttgtcctcaaaaattgggacgcttcaaggcaaaaccccggagatccgcttcagaaacggccgccatacagcactctatcggaatgttgcctatcctgaatttgacaaatatcgagaaaaagcggaaggaaacgcaatcaatcacgccctggatgccatgttgttggcttcagaactgcccgacctttatcccgtggagtcattgaatataccgttaagcagtttgaaggcatggtcagcgtctgtgaagagaaaggccccgaagccttcagcagacggcattccgagcatccagaatcttaatgattttgttgatggctttgaagtagttcatggagacggctatgtcgatgttgcattgagaaccatggtctggaatcaaagagacacgatgacccacaaacaggatccctacggatggtctgcaaaagacaaaaggcccaccaagaggacttcggcacttgacctgtacacagaactcaaaaaagagaaggccggcaaggtaaagaacaaagtcgaattgattcatcacccgtcattgagaaaagccgtttcggatgccgtgactcccgaaaatccgggaggaacggctgcagaggcgttaaaattatggctgtgtaactcggtcagaaataccttaaagacatcccatttttcaaatcatccaggcgatcgggcacgaaaagaggccctggaaaaatttgcgagcaatgaaaacgaaacgatcccagcggtcatcggtgtcaaaatgtttgacctgggtgttcagggaaagatcgatttggagagattggacaggcagacgggcaacgttggccacagatacatgacacaaccacccaataggggggtgattgtagcatatccgaaagcgagtgatgggcatccggatatggcccgtccctgctgtctttacttaagacagaacggtgcggttattccggaaggactcgccattttcaaaccacttcccgacaaattatcaaaaggtcggatctttggttcccataataacgaggtaagcactttgtttcgtgatgtcgaagattacctgaaggattgcggctttttcggctacattttattaacgccgggttgcgttgcccattacgctgatggccattcttggttcgtcaggaactttgatcaaagtaaggatttcaagaaattccgattgagaaatattgtggctataaggaaaacacccttttcccaaaagttgataccgcaaaaggtattgacctgaagaaaggagggtgttacacatttttcaggttgttctttgacaattcagattctcaattatcggtccggttgaaaagagcatcggtctgaaggatgcactccgggatagggcagtcccggctcttgctgtttccccggtaagacctcggaagcaagtccttcagcaagtcgaaagacacgatgtgagcctattttttaaatgtgaatcaaccgatatcttcacattcattgtgacacggtgagatgatgacccgccagaaggccaaaatgtttcaatcaaccgatatcttcacattcattgtgacggaatccatcgggcccggatcacatccttatatccgtccagaccacccaaatgttcaaagtttcaatcaaccgatatcttcacattcattgtgacgacgatctgcctgcttaactccgatgtcatactggtttcaatcaaccgatatcttcacattcattgtgactccgtaatggtatcaatgattgttgacgctctggtttcaatcaaccgatatcttcacattcattgtgacacggtgagatgatgacccgccagaaggccaaaatgtttcaatcaaccgatatcttcacattcattgtgacgggccgacaccctgaaatacgcccaggagaactttgtttcaatcaaccgatatcttcacattcattgtgaccttgatgccctacggacatcagcaattcgaccctgtttcaatcaaccgatatcttcacattcattgtgacagcggatctgaattgtcaaagaaaaacctatccttaagaggcgttttccgcgaacctctctggtaacttccaaagtttgatcatttttccattttacagacgcttgggtacgaattaagtattcaatattacatacaatattgatttccgcgaacatccaagtagccaaaaaaggaaaaactttgtattcatttccttttcctccattcccacgacggcataccgtgagagtcactccgtagtcacattttccattccgaactcatcttcttatttgatccaatgactttctttggaattatcgtaaaagggtagcaatagggtagcagaaaatgataaggggttacgatacatgagtcgtaaccccttgttatttctggtacgcctgctgtgattcgaacacaggacccacggattagaagtccgttgctctatccagctgagctacaggcgcacgagctgtgtcacacgactttaaggagttgaaattaatagcccctttaaacttccttgtcaaggcaaaacaaatattgggaaaacatgtgcactacagggcggtggggtcaagcctgaaggtcgcgggttggcgagaaataatgacgagaaattcgagaaataatgattgacgaacacgccgagcttccataatataaggcgtgcatggatatataacgaattgaaacgcttgcgttcttcgttttcagcgaaattttttaattagctttttccctgggatatgttcaaggaggtggaccgtgcgcgtaagagtggcgatcaatggattcggtcgtgtgggacggtatcttgttcgggcctgcgtggacagggaggatatggagatcatggccatcaactcccgggccaacccggaaattctggcccatcttctccggtatgattcggttcacggcccgttttcgggaaaggtggaggtaaaggattcctctttgatcgtgaacggccgtgaaatcatgattacgtccctgacgggcgacccgggcgctctgccctggggggacatgggtgtggatatcgttttcgaatcgacgggcaaattccgcaagcgcgccgaatgcgccggccacatcgatgcgggggcgaaaaaggtgatcatcgcggcacccggcaagggagtcgacggcacgttcgtcatgggtgtgaacgaagcgtcttatgacccggagaaacatcacatcgtttccaacgcctcgtgcacgacaaactgtctggccccggtggtcaaggtgctccacgattctttcaaggtcacccgggggttcatgaccaccgtccacgcctataccatggatcagcgtcttctcgacgggtctcacaaggatcttcgaagggcccgggcagcggccatgtccatcgttcccacgacaacgggggcggcccgtgcggtcacggaggtcatccccgagctgaagggcaggatggatggtgtcgccctccgggtccccacgccgaatgtttccgtcgtcgattttgtggcggaggtgggccggaacgtcacgatcgctgaagtcaacgacgccctcaaggcggcggccaacggaccgctgaagggttacatggcgttttgcgaggaagagcttgtttcagtcgatttcacgagcagtccttattcctccatagtggatgccccgttgacgaatgtcatcgacgggaacctggtaaaggtattttcctggtacgacaacgaaagcgggtatgcctgccggatgagagacctggcccttttcatggggaaaaagatgaccggtaagtaaatggaaaagcctgtttttgccgcaaactggaagatgcacaaaaccatcggggaggctgtttcgttcgcccggaagctgaccgagtccatcggatccctttcagaccgggaggtccttctggcgccgccctacaccgctctttccgccgtttcccttgcctgcagggattccgccgtttcccttgccggccagaacatgcactgggaggaaaaaggggccttcacgggcgaaatttccccgaacatgcttctcgatgtcggctgtacgtgggtcatcctcggccactcggaaaggcgtcatcttttcggggaaagcgacgtaatggtgaatgacaaggtaaaagccgccctgaaacaccacctgaagcctctggtctgcatcggggagaccctggaggaacgggagcgggagaggaccttcgccgttgtcggaaaacagttgacggggggattgaataatatttctcccggtgatataaaggcgctcacaatagcctatgagcccgtttgggccatcggaacgggaaagacggcaacgcctgacgaagcccaggaggttcaccgttttatccggaaacagctccgtgaactttacggcgcggaggccgcccggtccgtgagaattttatacggcggaagtgtcaaggaatcgaacataaaagaactcatgggcatgcccgatatccagggggttctggtgggcggggccagcctggacgttgattctttcctgaatattgcccggtgcccattacaataacagtaaggagatagaaggtcttgctcattcttgttacagtcattcatgtaattatctgtcttctgctcatcatgatcgttctcctgcagagcggtcgcggggcggacatgggggcggctttcggcggttccagccagaccattttcggcagcagcggcccgacgacttttctgggtaagatgacgacggtcatcgccaccgtttttatgctcacgtccttgtggctcgcctatgtcgccgttcacaaggttccctcggtgatggagggtgtggcggttccttccgcggtggagcagaccctgccgccgacggaaagcggacaagaagaaggggctcccgcggcggtacccgctcagccggcacaaccggttgaaacgggtagcgaaaacgctggtggaacgaagtagcggatcgggaggttttccgcgttcccgctcacttttgtattgacaaaaaccgtaaaagaaaatagacttttcacgcaaatgccgaagtggtggaatttggtagacacgctatcttgagggggtagtggggaagcccgtccgggttcaagtcccggcttcggcaccattctataaaacaatatccttcgtgattgtggggaattggaactaagtccaattccccacaatgcgtttcaggggtcttttggggtgatcccatccctcctgactttaccttggcatcccccgttccgataccggtgccgggccttgtggacagcgggcatggctgaaacgtgtcacgcggggtcttgcctcattttttttctctaaatccacgttagttgaggtatcactcacagtggaagaccttcacgacccttctggtccccgagaaggcgggtccaggggaacagcctcgtcgatgagcatgacggggatgtcgtcctcgatcctgtagagaagacggcagtgatgacagatgaggccgtctttttggtcgctgaggacgatgtcgcccttgcacctggggcatgccaggatgtccaggagttctttcctgatggccatcgttttcattctccttttgccgctggtttcaaaagggagcggcccctcttctttgttttccccggcaatctacccttcgccgaaagtttgaccgcgtcgaaaacttcctgaacggtgatctccctcatgcagtccatgcggtcgcactttttgagaaagcaggggctgcaggggaggttcttcctgatgacagtgtggttttcgccgaggggacccgtcctgatcgggtcggtgggtccgaaaagggcaatcgtcggggttcccacggcggcggccagatgcatgggccccgagtcggtcgtgatcaccagggccgaccgccggtaaagggaggccaggtccttcagtgtcgtttggccccccaggttgaccgaccgggggcagagggccttgatgtcctcaaggataccgtcggaccggctacccgtgagaacgacgggaacgttcatctcttccgtgattcggcggcagagttccccgaatttttcactgtcccagagcttggttttccagtaggcgacgggattgagggcgaaaaaaggggttccgggaaccagtcccgactgccggaggagctggtccacccgggtccggttgccttcgtcctcgggaatatcgaaacggggatttcggggatcgccgcccaggtgggaaacaaagtcgaggtatctcaggacggcatgctttcccatgtcctcgtatatcttttcattgtagaaaaggccgctcagttcctggaggctggcgtatccgacccggcgttttcccgaggatagaaaaacgagaaccgcgcttttcaaaaggccgtgaaaatcgatgaccaggtcgtagcgccggtcccgcaagtcgcccagaaatgttttaatgtctctcagcgtttccggaaggtgtcgtcctttccggatgtgggaggcccaggtttttctccgggacacgatgacccggtccaggcagggatggcccgccagaaggtccgaagccccctcttccacgacccaggtgatgtgggcctcggggtaaagctttctcagcgcggccagggagggaagggtgtggatgacatccccgatggcgctcagcttgacgatgaggatattcatgattccctatcccggatccaccggacggcgtcgaggacatcgtcggccctgtaaaggacccggtcggcccggtggatgttgacaccgtaacccgtccggaccaggatgccaccggcgccggcatgtcgggccgcctccatgtccttcagcatgtcgccgatcatgtaggaccggtgaaggtcgatggccaggtcggcggcggccctgaagaaaagccccggtttcggctttctgcagtcgcagtcctttctgtaggggggggtaccgaaatttgggtgatgggggcagtagtaaaaggcgtcgatccgcgttccttccttttccagcctcgcgtttatttccccgtgcacttcgtgaaggaacccctcgtcgaaaaaccctcgggccacgccggactggttcgtcaacaccacggctttccgtcccatttcatggatgagggcgacggcctccgccgtcccgggaaagagcttcagctggtccagccggctcagatagccgacttcctcgtggatcgtcccgtcccggtcaagaaataccgcgccgttcccgctcatgccggatagtcctcctcatggctcagcagggaggacgacgcctcgtacacgtcttcctccgtgatttctttcatgcaccggaaatcggtggggcaggtttttttcaggcaggggctgcaggagacgttcttcgtgatgaccacgcttttttcccccacgggagaggtggtccggggattggtggatccgaaaacggcgaccagcgggaccccgaaggcccccgccaggtgcatgagacccgagtcgttggagaggaagagccggcagcgggaaatgactgccatcgcctctctcagggatgtcgagcccgccaggttgatcatggaatgccgcccggccccggccacccgttcggccacggccctgtccgccccgctgccgaaaaggacggtcctgagaccgtattcgtcggtgagacggtccgccacggcggcgtaccgttcggcgaaccacatctttgcaggtccgtaggtcgccccgggggcgatgcccagcaggggcatctccccggtcatgccatgggcccgaagaatctcacgggttgcggcacccgtgtcctgtcccgggaaaagccggaccgccgggccggcgtcacggccgcccagggccttgatcatttccaggtaatagtggatctggtgacgtttcaggatcgccttttcccgttttaccgggtgggtcagaagcagccttcttccgtcggtgccgtatcccgcccggatgggaattccggcgaggcgggcgatgagggccgcctcgaaggcgttctggagaagaacggccgcctgaaagtctttctttgcgagagatcgggcgagccgccattttcccgggaggccttcatggatgcccggggcttcataaatcatgacctcgtccacgtcagggcaaaggtcgaagagatcggccacccagggtttcacgagaacggtgatccgggcccgtggggcgcttttgcggatggcccggagggccggaagggtcatgaccacatccccgatccagttcgttccgcggacgagaatccgctccagatcggcgaagggaacggtcctggggggcgtccgtttcaccatgccttgacctcgtaaggctttgtcttccagcgctggtgcggccagaaccactggtcggggtattggcggatgaacccttccaggtaggatgtgaaggcctgggtgttttccacgaggtctcgctcccggtcgcctgtccgggtgacggggatctccggccccatgatgacgtgataggcgccgtcggcctgccggacgttgatgacggggacgacagcggtgcccgtttccagggcgaaacccgccacaccccgggtcgttgcggcggggcgtccgaagaaattcacgaagaccccttcacgccaggcgacgttctggtccatgaggatggccaccgcctggttgttcctgagaagcgaccggatggattccgatgcgccacccttcgggatcatccggtgtcccgtgatgctccggaaccagaggaccacattttccagcacggggttgtcgaggcggcggtagacgatgttggcgtgaatgcccacgaagccgatggccaccgacatgagttcccagttgcccagatggccggtgaaaaagaggcagcctttccccctggacagggcgttctcgtagtgttcccggcctgtgaatatcaccccgggggggagctcgcccggccggtaggtcgggatttcgaagaattcggccgccacggtgcctatgttccggaagacgtttctcccgatccgggaaatttcaccggtttttttttcgggaaaagcccgcaggagattgtggagggtgatgagccggtgccgcggggaaaatcggtaataaaggagaaagagggcccggaaaaattttttccgcgccggcaggggtaaaacccggaaggtgacgagaatgaatcgggtcgaacgggtcatggtcacgatgacagaacccccaggatcaggtcttcaaaggcctcgtttccgtcatcgagggtcatgacgatccggagacggtggaattcttcgtggaaatcgggaaatttttccagtttgacgccgtccttttccgtggtgacgaggacggcaccgggaacgcggccggcgacccggcggagccggtccacatcttcccgggtgtaccggtgatggtccggaaacgtcacgcaggccggggcgtttccagaaatttcgttcagcatcctgtgaaaggaccggggggcggcgatccccgaaaaagccaccaggggtttccccctgaaatccgccagggggcggcggttgttttccctcccgcggatgaaggattccgctttccgacgggcccggaatagaggtttttcactgggaatccggggatcggcggccgccggtgcccctcccgtttccccggctcctgtcagaatgatggcgtccgcccgggagagactttccgggggctcccggagtatcccccgggggagcagatggccgttgccgaagggggcgttctcgtccatgagaagaatgtcgaggtcccgcccgatctttcggtgctggaacccgtcgtcgaggagcagaatgtccggccggaatcttttgagggcttcgtatcccgcctcgacccgctttgccccggtgacgacggggacgttccccaggacccgggccatgagatacggctcgtcccccgccctgtccgggtcgaggaggaccgcctttccgtcggaaacgatgttcacccggctcgccccacggcttccgtagccccggcttatcaccgccggccggtttccctgtttctggtagaaacgggcgagatggaggatcatgggcgttttgcccgttccccccgtggtgatattccccacgcacaccaccgggaggggaagcctcaccggttggaggattttcctgtcataaaggcggttccgataccggacggttccctcgtaaaggagagagaggccatggagcagggtcgtcagggaccgggtaggcgaaccgccctttccgggggaggcggtcgccgggatgccatggtctttccatacctgtcgtctcatgcttcgaacagccttttctcccgctttttcagattcccgccgcaaggccttctttcggttcccggaactggagggtgtaaaggcggctgtactcgccttccttcaggaggagttcctcgtgggttccttcctcgacgatgcggcccccggcgagaacgcagatcctgtcggcatgctggatggtggacaaccggtgggcgatgaccagggtcgtccggccccgcatgaggttgtctatggctacctggacttccctttccgattccgtgtccagggaggaggtggcttcgtcgaggatgaggacaggggcgtccctcaggatggcccgggcgatggtgagccgctgccgttcccccccggaaagacggaccccctgctcgccgatcatggtgtcgtatcctccgggaagctgttcgatgaagtgatgggcgtttgccgcccgggccgcctcgatgacggcggcgtcgtctttcccgatatccccgtatgcgatgttgtttctcaccgtgtcgttgaacaggatggtctgctgggtcaccatggcgatctgggcccttagggattccagggtcaccgcacggatgtccaggccgtccaggaggatccggccctcggtgatgtcatagaaccggggtatgagattggccagggtcgtcttgccggcaccgctggatcccacgaaggccacgatttcaccgggccggatggccaggttgatgtttttcaggaccggggcttcctcgtatcggaaggaaacgttttccaggcggatctcccccctgacgggaggcagggggacggctctttcggcattcgcgatgtccggctccatgtcgagaatttcgaagacccgggtggcgccggcgattccctgctgtatcgtgttgttcacgttggtgaggcgtttcaccggctcgtaaagcatgatgagggccgtgaggaaggaaaagaacgttcccggtgtggaagtgccctggatgacctggtaac

SEQ ID NO: 100 - DNA, 22198 bp, Artificial Sequence; identical to SEQ ID NO: 99
  Synthetic

SEQ ID NO: 101 - DNA, 19310 bp, Syntrophaceae bacterium
  misc_feature (4594)..(4595): n is a, c, g, or t
  misc_feature (14253)..(14254): n is a, c, g, or t
ctgcccttgcccttcgcaacggttttacttggaaaaggccgccgtggggacgggcaatcgcaacggccttgtcgacaatttccgcccgaatcaccaggggaatggcgcgaagcgccgcaatggtctcaccctccttcactggaaaattggtatgacgggaggcacacatcacctcttccaggaggttgatctcggttaacgcttctacattcgctttaaaaagaccgtcttgcgccgcgaccagattgatcttgccttcctttggttccccctgccaggtgacgccgttgccaccaaacgcattggccatggcaacggcggcatcgttttcgtggaggtacccctcctcgatctcaagggcaaataggtggcgcttcccgagcctctgtaaatgacagatgtcggactcacgaaccttgtggccttttctgaatgccggacctttgaactcacctctgcggatttcagtgatatcgtgggcaaggatcgctcccacggcgtcttcgatatttattaccctttggctcatttcagttcgtaatacccctttccctggcaggcgaggcagccgtcaacccaccctttgagaactgccggcaatccgaaccaccatagtgggaactgccagatcatcaactcacactactcgatcttgctgatctcggactcaatctcctccgaaaacccattcatttcgcttgcgtacatttcttcgatctgtaatttgaggtagtccgggtctttgatggttgtaaagttcttccggctggaaaccggctcgaattgcatctcatgcaggtctgaacttcttacttcgtgccctgctgcggtaagcgtctcgtgcgcagtgcaaaacatcgcagcgttaaagctttggggttcgggatgccaataaacgatgaatgctttcataaatgacctttcctgttcaacattgcttatatggatcggtataaaatctcaaacaccacaatatttaccgttcattcgagtgcacttaacagtctgactctgttttgttgccggcggagttaaagagggatgcgcatgcccggtagtcggagggggtatcgatgtcgctgatcacttccgtccggtctacggccacccggagcacgtctgccgggtgatcgtacaagagacgccgcacgccgtcattggcgaacccgagaatctcattccggtatttcagtgcgaacacgatcggatgtcctttacgcccccggcaggtggggactgcaattcctttttcgctttgcaggaatgcggccaaaaccagatcgatggtggcagtttggatcagcggctggtcacccggaataagcatcaccgcttcggcacccaagtcgacagctcctattccggcgagcgccgaggtcaacattccttcccggtaatggggattcgtgaccagccggacgggcatgccccgcagtcgggcggcgatggcttccgcctcgcagccgactacgaccaccacttccgcgaccgccgagttgatcacgtttcggaccgtgcactcgatgatcgtgctgccgccaagcgggaggagaagcttgggttctcccatgcgcctggactccccggcagcgaggataactgcggataccgctcctttcatggttggtctcccctcctgatcttgacgatctgcgccatgatgctgacggcgatttcttccgacgtctcggcgccgatatccagtccgacgggggcatggacgcggttgaggcaatcctggggcacgcccctggccagcaggcgttccttcacttcttttactttcttcctgctgccgatcatcccgacgtaccgggcttcgctgcgggacgcgacatagaggcactcctcgtcgaaggcgtgtccgctggtgcagatgaggacatagctgttgctgtccatgccggtcttgcgcagtgcatcggcgtactccccgacaaccagcgaatcgaccgcagagaacctgtctgcattgttgagttcgggacgcgggtcgattactgtgacatgaaaacccagcatccggccaatggccgctgcggccaggccgatatgccccgcgcccgccacaatcagtgattcagccggcatgaggggttccaaaaagacatcgacctgtccgccgcagatgcccgggcccttctcctgacccgaaaggtcgaagtgaagcaatgaatggcggcctgtgaacatcacctcgccggccttttcacgaacttcctgttccagcgttcctccacccaccgtgccggcaatagaaccatccttgtgcaccagcatcttggcgcccggtttgcgtggggacgatccgtcgctgttcactacggtcgccaggactgccttctcccctctggacagcaggtcggcgatctcttggtacatttcggtcatgtttcgaaacctcaagttgttgccgcaatgccgttctccccacgtcaagccgcattgaatgcggcgttcaccgctgcgggttcatcggcaggtttcgcaatctgatttttgcagcccgaaaaatggcgttggccactgaatcaggatctaacttcgcttgtacgcggccagttcctcggcgataagacccttgaagagttcaattttatattcgttatgctgcatgggccgcgcctgccgcattgcagcggccgccgcccgggcaatgatatcgtcatcgagggattgtcccgtgatgatcttttccgaatcggggcagcgccacggaatcggcgccgcaccgcttagaacgatccgcgcgccggccacccgcccctcgtggaaatgcagcgcaagggcgaccccggccagcgcaaaatcccaggaaccccgcgccctcacctttcgataggagctgtgaaacccctcctccgccggcggcagcaaaacggcggtgagcacctcgcccggttcgagaatcgtttccttcgtgatcccctgctcgggaagaacgaaaagcttctcgacagggatctttctcgtttccccggcgcccgcaatctcgaccgaggccccgtatgccacgagcgccggcgcgatgtccgaaggatggacgatataacaccccctgccgcccaaaatgcaatggtactggttttcgcccgccatcgcgaagcaccgggtgccccctttgcgagtgcaatgaaattccccccggtagtaccagcaccgcggtttctggcagaggtttcccccgatcgtcccctggttgcgcagttgggggctcgcgacctccagagcggcctgcgcaagggcgggatagccttccttgacaagttcatggttcgtaagctcggcgacagtcgctagggctccgatccggatggacccgtcttttaggcgctcgacgcgtttgagctcatcgagttggctgatgctgaccaccttttccgcggtgaagacaccatcgcgcaggcagccgagcaggtcggttcccccggcgtggatccgggcattgcccgccgaaagatgcgaaaaggtctccttgagcgacttgggacgcacatagctaaaattcggcatggtcatgatcacccctccttcgggacatccttaaatggttcgcctgagcttggccgcctgctcaaccgccttgaagatatgtgcatacgatccgcaacggcagagattgccgctcattcccaggcggatctcctcgatcgacgggttcggattgacccgcaacagcccctccgctgccatgatctggccgggcgtacaatagccgcactgcatggcgtcattgtcccaaaaagccttctggacggggctcagctcatcgcccttcaaaagtccctcgatcgtggtgatcgcctttccctccgcctccaggaccagggtcaggcaggcatagcgcggccggccgtcgatcagaaccgtgcaggcgccgcattcaccgcggccgcagccaagcttcgggccggtcagacccagtttttcgcggagaacatccagcaaagaccagcggggctcgaccttgaaccggtgacgccggccgttgacctgaaggctgacatggaccatctcccccttctcggccacttcggcggctgcagccggcaagggtttgcccaaatcgcccacaaccgtcgtggccagcgccccggcgcccaccagttgaatgaatccgcgccgcgaaatcccctttcgtccctgcccgttgctgactttccgatccttttccatgagtttctcccccgatgaattcccgtgatggccctcaaccgagagcgggtatcgtttcacttatgttcatccttgcttggacgttcctttttccatggccgccagcgcccggcgcagcacgagcgggctgatcggtgtcgatgtcagtctgagcccggttgcgttgtaaacggcattggccacggcggcggccgtgggaatcgttacgggttcccccagccccttggcgccggtggtgttggcctcgttgtccggggaatcgatcggaacggacacaatgtccgcggggacgtccatggccgtggggatcttgtaatcatgccagttgccggaaacgatcttgccggtctggtttcgatcgaggatccgggcctccgtcatggccaatccgattcccatggtgatgccgccgatcacnnatgttcacctcgacctcgcaaaactgggcggcaaaggggttgattgcccggttggccggattcgggccgcgataaccgataccgacgatgagcccctgtttcttcaaacccgcgacgtccgtaaccttgatctttttcgagggatcggcaagcgatagaatcgttccccctttcatcgtaagcgatgcgggtttttccttaagctcctctgcggccatcgcgaggagctgctgcttgacatggatcgcggcagcccgcacggcgggcgattcggtgggaaccgtcttgctcccgccgctcggtgttgcatactgtgtcgttgccgtatcggcgttgtcgatatcgatcagatcgggtttcaccccgagctcctcggaaacaaccagggccatgaccgttctggttcccgtgccgatgtcactggctcccatattcaggctgacactgccgtcggcaaagagcttgacaatgatcgtcgccggcggtccgccgcccccgacgacccacatgccaccggccatcccgaccccttttcgccaattccgatccttgttggacgaggcgattgcgcttctaacttcccgccatccgaaggacttggcgccgtcggtcaggcactgccggaatcccgtcgatgtatagggaggattgccggtccttgcctggctgacagcagggatgttcttcagacgcaactccaccggatccatcccgatcccctccgccagggcgtccatcatctgctccagggcccatgccccctgcggatgaccgggagcccgaaaggggcgcgacgggcaggcgttcgtatagagatcggacagctccgtccgaacattggggcactgatagagatccttgatctgccagtcgatgccgcccgttccgccggcagggtaggccccgctggtggccacgcaggtgaaatcgagcgccgtcagtgtcccgtccttttttactccggccttcaggcgcatattcgccggcggacggttccccgcggcgataaaggtctcctccctgctcaggaacagcttgaccggccgtcccgtttttttcgccaggagcgccgcaatgatggtttccttctccgcctggagtttgcttccgaatcctccgcccatgtaccggccgatgacgcgcaccttcgagaggggcatgcccaggatgtcggccgcctgcgactggacgcggtaaaccccctgagtcgactgccacagggtcagctggccgcggtcccatttcgccacgcatccgtgccgttcgagcggcgtgtggatctcgcattccgtccggtacgtctgctctaggatgacatccgcctcggcaaatccccggtccacgtcgccccgctgataacgttccggcggcttgacccggttcccgccatcatggacgaggggtgcgccgggctgcagcgccttgagctcgtccaccgttgcctgcagcacctcgaattctaccttgacggcccccagggcgtcgcccgcctgataagcagtctcggcggcgacggcggcaatggcctccccctcgtaacggcagcggaactcgaaaatcttgcccttgacgtcgttggggtaggaccatgcagggttcgcctcggggctggaacccgtcaaaacggcctgcacgccgggcatcccttcagccgcgcgcgtatcgatgcttttgacgacggcgttggggtagggggaacgcaggacggcgccgtagagcattcccggcagcgaaacgtcggacgggtaaacggccctgccgctgacaagctcatagccgtccacgcggggttgtcgtcttcctaccatgctcgtgctgccccacggcttgggggcggaacccggaccgggggtctcagggacggtttgctcatcggaataataggggtggttctcctggctcataagacacctcttgatgatgatacgaccatgccatgctcattttagagagccattcctccccgcaacgaggcgggacaatggctcccggcaaccattcggcgatatcggccaaagcgtcgtgtgacattccggatatgcttatgcattgggattattataggaggtccgcatattcttgtcaaaaagaaacttgggaacacgaaaacatgatgacggcagataaaaacggatatataatgagccatcatcgtcaaacaaccacacaaagggggactccgaaccatggaaatcatcgatctgaagattaaccgtaaaccagtccgcttgagtgtcgacgcggagcggatgctcctgtgggtcttgcgcaccgacctcggattgaccggcacaaaatacggctgcggccaggggcactgcggcgcctgcacgattctcgtgaatgagaaggccgtccggtcctgcatgatgccggttaaaatggtcgcaggaaaggaggtgctcacgatcgaagggcttgcccagaacggtgttctccatccgcttcagcaggccttcgtggaacatgacgcactgcagtgcggcttctgtacctccggtatgatcttgaccgcctacagcctgttgaaggataatccaaagcctagcgattccgacattatccggggcatggatcataacctgtgccgatgcacatcgtatgtacgcgtcatcaaagccgttcgcagcgcggcgatcagcatgaaatcagggaggaccgcatgatggaagacaaaccccggcatatggaatccgacaatgtcacgatcgattttccgatcagccgccgtgattttttaaaggttacgggtgggggactcatcatctttttcagcgccggggttcttcccgcccaggaaagagccccgcggcgtggtggacaggatctgccgaccgattttaacgcctttttgaaggttggcgcggacggacgagtaagctgctttaccggcaaggccgaattgggccagggtgtgatcacgtcgctggcgcaaatgcttgccgatgaattggatgtccctttggacagcgttgatatggtcatgggcgatacggatctatgcccgtgggacatggggactttcgggtcgcgcagtacccggtttttagggccgcctctccgggaggcggccgcggaggcccgtgccatactattggcgatggcagcggagcaattcggtctgcctgtgagccgtttaaccgtcaaggatggcgtggtgtcggacaaaaagaacggcgggaaacaggtcacctatgcccagctcacccagggaaagatcatcgaaaaacaccttgctgccaaaccgccgttgaagaaagtgtccgagttcaaggtcatggggaaatcctacaggcgcacggacagcttgcagaaagtgaccggccaggccctctacgcgggggacattcgtctgccggatatgcttcacgcgaagctgttgagacctcccgttcatggagccaagtggaagcatgtcgatacctccgccctcaggaacgatcccgaactgcttgtcgtggaacagccggacatgatcgcggttctccataagcatcccgatgttgcggcaaaggcactgtccctagtgaaggtggagttcgacatccccgagagcgatctggacaatcaaacgatacacaaacacctcctcgccgtggcgccgaaagcaggagagatggtctcggaagggggcaatctgaaggaaggggagagactggccgcgcagacttttgaaaacacatacgctgattattatgtagcccatgccgccatggaaacccacacggcaacggctgcattcgacggggaccgggtgacggtatggccgtccacacaaacgccattccccgcaaaagagtccattgcccaggccctcgggattcctgcccggaaagtgcggatcatcacgccttttgtcggaggcggattcggcggcaagagcttcaatcttcaggccgttgaggcggcccgactcgcaaaactgacgggcagacccgtacaggtgatgtggagccggaaggaggagttcttttacgataccttccggcccgcatccgttgtcaaaatacggtcgggactcgatgatacgggaaggatcgtattctggaagtacgatgtttactatgccgggtcaaggggggcggatcaaatctatgccgtaccccaccacagggaaaccgcctatgtccactatacgggaatggccggcgcccatccgttcgctaccggtccgtggcgtgcgccgggcaataatacgaacaccttcgcccgcgaatcgcagatcgatatcatggcggcgaaggttggcgaggatcccctggcgtttcgcatgaaaaaccttgaggataagaggatgctgaataccctgaaggccgctgccgcggcgtttcggtggcgaaaggcaaaagcccccagcggccgcgggtatggtgtggcctgttcgatggatgcgggggcgtgcgtcgcggcgatggccgaggtaaacgtgaaccgggccagtggtgagattgaggtcaagcgtctggtctgcgcccaggatatgggaatcataatcaaccccgacggggcaagactccagatggagggagggctcgcaatgggactgggctatgcgttaaccgaagaggttgatttcaagggcggcaaaattctgaataccaatttcgacacctatgagatcccccgtttttcctggctgccgaaaattgagaccatcctggttgagaataacgacgttccccctcagggaggcggagagccggccattacctgtgtgggcgcggtgattgccaacgctgtttttgatgctgcgggggtccggctctttcagatgccgatgacgccgatccgggttaaagaggccctgacaaaaggcaagccggagaaataggaggcttatccataaccatgtccaccataaaaggggtcaatccccagggtgacccgttacatctttatcgaagtcttcgggacagactgcttcggaaagaatgcctggttctggcaacggttatttcccgttcgggctcaggtccgcgggaacccggtgccaatatgctcatccgcgctgccccagcccctcacagagccaatcacttataccataaatgtcgaggatattgcgtcactgattacgcacagaagtcctgcattttcttcaaggcggacggtttgtggataacaggaagcagtcagtacaaagcccctccctcacaagacacggggtctatgatcaatgctaccatacatcacctcgctgggttacatggtgctttgaaggacacggagtatcaagaacttgtaaatatatccccttattccctcataatgtcaatagggttatctgaaaatattgaaaaaatcttgccatcggcattgtatgttgttatacataaccatcagacttccccacttcttgataaagctgattttataacgccaggtcctgatggagcagatccactatggttacccttggtgttgattacggtgcttcaagcgtagggcttgccttggtccgaagcgatgagaagggccataacatccctctttttgccgggacgatccgattagacgctcgctggttgaaagagaaggttgaagttcgcgccggtatccggcgattgagaagaaccaagaagaccaagagacaccggctgcgccagcttgagcaatcccttacccaaataggtctcggcgcagaacaaatccaatccattgtccgtttcagcaaccgcagaggctataaatccctctttgatgctggcgtcgccgatgatgaccatgatgaggctgaactgacctacagattcaccagggaagaatttttcaaggccctcggcaccgaactccaatcgattatcccggacacctcccaacggcaaaaggctttatccacctgcgagacgatcctcaacaggcagggcgaccgttcccttgagatccggcagatcaagatcgacaaccgcggtgcaagccgctgtgcatgggaggggtgcaaccgggtgacaccccggtccgataatgccttgggggaagtgctttctcagcagatctacaccgtctttcagtccgcgttgaaggttaatcccgtcttatgccagaaggtcgaaacggccacccatgagttgcatgaacttgccaaaaggctccgcaatgcctcgggtgaggctgcgtccaacgaaaagaagattcttagaaagagggcgcggaccattctccgggctttgaaagaattgctctacacccccgcggaaggtgtcggagacgctgagaaggcttggaaatacatcgaaacaggcatcatgaatatcatggagagccgactcgggagaaaccgctactgccgggaacacagcagggaatatgttcagacgatttgctcgggaaagctggttcccttcaagcagaccatatcggaatcggacatcatctccagacgggaacagattgcctacgcaaaactgtggcgttacattgaggcccgtattcttccgctgacccccggtggaattgaccggatcgtcgttgagaggaccgctttcgatcttcttgcgggaagcagaaagaccatccagaaggccaccgatcagttcaaggaggagatgtatcagcatggccccatgtatggttttgaaagcgtcccggacatgctgaaggaggagttcgggggtctttgcgcctactgcggccagtcgtccagcaccctcatcgatgtggaccatatcctgccccacgcggattttctcttcgacagttacctgaacatccttccggcttgcccgaagtgcaattcagacttgaagggggatcggtccgtttcggatgcgtcattgaccatccacccggacgcatacagggcctacagcgattatctgaaaaagaagttcagcacccgccccatgcactacttccattccatcaagaagggtgtcctgaacctgatgcaggatgcaagccgcctctgggaagcggagcgatacctctccctgattgcgcggcagtttggccagatcgtccaatcccagcggggtccacgacccttcgcccgttacctttccacaaaactttcccgcaggcaggggcaggccccggcaatcaggttccgcaatggccgtcacacggccctttaccgccgcgtggcctacccagattttcagaagcaggcggaaaaggcagaggggaatgtcctcaaccacgccctcgatgccatccttctggcttcggaactcccggatctataccccgtggaggctctaaacctgcctttgtggcagttaaagaattgggctgatacagtccgggcgagagccccgaaatccggggatgagggcgttccgatctgtccggacggccctcaatatgtcgacggctttgagacggttcaccccggcgggtatgtggaggtggatctgcggtccatgcgctggaaccagaaggacagcatgacccacaagcaggacccctacggcttttctgaaaaaacagggatgcccaccaagagaggttccgccttcgatctttacacaaaactgaagaaggaaaagaatccatcgaaggtgaaaagccggatcgccctgatccatcacccggcgttgaggaaagccttgtcggagagcctgcaatccgataccacgggttcatcggcggcggagaacttgaagacatggctgcgcatctccgtaaaaaacagcttggcccattcccgcttttccaatcatcccggtgatcaggccagaaggtcagaactggagaaatttatcacgcaggaggattgtccgatcccttcggtcatcggggtcaagatgttcgacatgggtgtccgcggcaagattgacatgaaaagactggacaggcagacgggcggcattggacatcgctatatgacccagcctccgaacaagggggtcattgtagcctatccaaaacgggaagacgggaaaccggatctgaccaagccttgctgcgtctatcacaagcaggatctgtctatgacacctgaaaatatcagcatcttcaaaccgccgcctccgatcctgtccgatggggtgatccttgggaaaaagccgtatgacaaaggagatagacgcaaggcgcttgaaaaatatctctcggactgcggttttcacagctatgtatacttgacaccgggatgtaccatccgctacaaggatggaaatgaatggttcgtaaggaattttgactccagcgaggatttcaaaaagggcagactcagggaaatcatcggcacaaggagaactcctttcgttgacagtctgattccattgaaagtcctgtcccaatagggattgaaggtaaagcatcaaccgttctttgacaattcagaaaaaaatatcagttccggttgaaaagagcatccgtccggagggtgcactccgggatggggcagtcccggcacttgcgttttccccggcttacgcttcggaaaaaggcccttcggcacgtcgaaagacaggatgtgagcccaatttaaatattgttacggtttgtttgattcaccaaactgatttcagatggtcattgtgactcggttgtcacgctttcccttccctgatccattgaattgtttcaatcaaactgatttcagatggtcattgtgaccggggcagacgttcttcctgctcaagatgtcgtggtttcaatcaaactgatttcagatggtcattgtgaccgtaccccttgaaacgattattgcgatgctgtcgggtttcaatcaaactgatttcagatggtcattgtgacctgccatctcattcccccaccatccttttcagttgtttcaatcaaactgatttcagatggtcattgtgaccgtctgactgaattgtcaaagaataacgatgccttttacgggcctttccgcgaacctccggagatcggcggattttttggcgttctcagggcaggcgtgcattgctgtatacgaccaactacccatatccatgagttattccactttccgcgaacctcaggccattatctcaggaacgtgtgaggaaaagaggccgccaatcgaaattgacgacttgtatttgaaaggctgtatgcctgtcaagattacctgatgctacattacaaggaagtacatatcaaccggatgaaccagaatatttatgttaaaaaaggctccaatgctgtacgatattacccggcaacacagaggaggttatatgaagaaatccgatcagggtaaaatcggcccgaaaaaaagcagcgaccggttatgaatcatatcagaaatttcagcattatcgcccatatcgaccacgggaagtcgacgctcgccgaccggttcatccagtacgccggcgtggttgaggaccgcgattttcaggaccagatcctcgacaacatggatatcgagcgggagcgggggatcacgatcaagagccaggtcgtctcgctcccctaccgcgcgaaggacggccggagctataccctgaacctgatcgacacgcccggccacgtcgatttcacctacgaggtgtcgcggtcgctcgcctcctgcgaaggggtgctgctgttgatcgacgccgcccagggcgtccaggcgcagacgctcgccaatctatacctcgcgatggagcacgatctcgcgatcattcccgtcatcaacaagatcgaccttccgggcgcggacgttgaggccaccaaacagcaaatcgaacacgctctggcgctcgatccgagcgagtcnngggatcgaagagatcctggaggccattgtggcgcggatcccgcctcccaaaggcgatccggcggcgtcgctcgccgcgctcatattcgacgccaagtacgattccttccggggaacggtgatccactgccggatcttcgacggcgccgtgaaggcaggcgacatcatccggttcatgtttaacggcgcgacctaccgggtggaagaggtcggccacttcctgctccagcgtcagaagcgggagagtctctccgcgggggatgtcgggtacatcatcgccggcgtgaagaccgtctccgacgttcgcacgggagatacgatcaccctggagaaccgcccctgcccgaagcccctgcccggcttcaaggaggtcaagcccgtcgtcttcgcctcgatctaccccatcgccgcggacgattacacggacctggccgactctctggataaattcaagctcaacgacgcctccttcgtctatgaaaaggactcttccaccgccttgggccagggcttccgctgcggctttctggggcttctccacctcgacatcgtccaggagcgcctggagcgggagtacgacctctcgatcatcctctccgtcccgagcgtccgctaccggttcacgctgaaggatgggacggtcgttttcgtggacaacccggcccactatcccgaaccgatgtccatcatcaaatccgaggaaccctacatccgggcggcgatgatgctccccgagcggtatctcggcgccgtgatgaaactctgcatggagaagcggggcgtgaactcgaccctgaactacccgagccccggccgggcggagctgatctacgagatgccgctcgccgaggtgatcttcgatttctacgaccgcttcaagtcggtgacgcagggctacggctccttcgactacgacctgatcgattaccgggagagcagcctcgtcctgctggacatcctggtgaacggcgaaaaggtcgacgccctctcccagatcgtccaccgggagcgcgcccgcggccggggtctccaggcctgcgaaaggctgaaggaggagatcccccggcagatgttcaagattgcaatccagggggtgatcggcggggagatcatctcccgaacgacgatttcccccttccggaaggacgtcatcgcgaagtgctacggaggcgacatcagccggaagcggaagctcctcgaaaagcagaaaaagggcaagaaacggatgaagatgatcggcaacgtcagcatcccccagagcgccttccttgccgtcctgaagtcggacacggaatgaacggatggacaaacgatcgatcccgaatccggccggaaaccctcttcatgcggttcaggaatcggatgaactcccgggtctttacatccacatccccttctgcgtccggaaatgcgcctactgcggtttctactccgtcaccgaccgttcgcagatccccgactatctggaggccctccgccgggaaatggatttctaccgggggtgggccgcattttttgacacactctacatcggcggcgggaccccctccgttctgcccgccgcggaacttgaaaaactgatcaccgacacccgcgggacctttgcgatcttaagcgatgcggaaatcaccgtcgaggcaaatcccgcagacatcgacgcagggctcctcacggcgctccgccgcaccggagtgaaccgcatcaacatcggtattcaatccttcgatgacgggatacttgcctttctcggccggcgtcacgaccgggagcaggccgttgcggccgtcacggccgcccggatcgccggaattgaaaatatcggcatcgatctgatctacggcatccccggccaaggcatggacgcctggctcgcgacgctccgcgaggccgtcgccctaaatcccggccacctctcctgctatcagctcaccctggaagacggaacgcccctcgcggagcaatttcgaaggggaaaggtcgtccttcccgacgactcccttcaggccgattttttctgcaatacatcggaatttctggaagataacgcttatattcactatgaggtctccaatttcgcccgacccggcagagaatcgaggcacaaccgaaaatattggaaccatgccccctacctcggcctcggccccgccgcccactccttctcgggacgcgaacgccgctggaaccgccgcgccgtcaacgcctatatcgacgatctggcgtccggacgaacgcccgtcgagtccagggaaatcctgagcgacaaacagctccgcctagaggccctctttctcggcttccggacgcgccggggaatctgcctggagacgttcggaatccgctacggccaggaccttctcacggaaaaacgggatatgctgaagaggctttccgaggaagggctcgtggagatccgcgacggatttctccggccgacgcgcgcggggatggccgtcgccgacagccttgccctgatctgaaaagaggcttcacaagaattccagagaagatcgcgcgagctggcgctggcggcaagccagcagccgcgaagaaacgcccgctacggcgcggtcttttcgggcttctcggcagcctctccgttgtcgcgaccccattctgtgacgtagacgcccagcagaatcatcacgccataaagcatcacttggagcgtcaatttttccgccagccaccatgcacccagggcggccgtgaccagcggctgaaggtaactgaaggccgccactcgcgaggccataagttcggtcaacgcaaaagcataaagcagatacgggatgaccgaaccgaaaaccaccatgtaaagtaagcccaaccaagcagaaattgaaaggcctacccaattggcctcccagacggactgtgccccaaagggaatgaggatgattgcccccaaggcaaaagccagcgtgttcaaggtgagtgcatcatagcgatcggctaactctttgaccaggacagtataagccgcaaaggtagcgctgccgccaaggagaagaacatctccgagccagtagttcccccattgctgactcgcttggccaatcgttaacaataccaccccactgaaagaaagcgacatacccgcaattttctgaaaagtaagagcctctaagcgggccaagcaggaaatcagcagcaccataaccggaccggtggaagaaatcagcccactgtggacgaccgaactcttggacaggcccacaatgaaaaagacttggttgagacaacttcccatcaaagccacgaccacgaagaatagccaatcccgccgcgtcagttttaaccgtgggcggttgcgccaaataagaaaaacggtcatgtaaacgatagctgatagcagcactcgcagttgggctaaggccatgggcccaaagccctgcaaagcctctttaccggcgactggagtgccgccccagcaaagcgtggcgagaaccagtaacccatacatgcgggcgggggaggtacttttccggcttgtgggcgagactgcctgctcgctgatcgcggggctactcaaaaagctcctttcgtaccgtgagcttttcgattcgttcgagattgggaaggtagaccggtccagggtaccgtggaacccggatcgtcccttgagagctcactgtcacttcgggatcaataatgtcctccagccagtaccggcggctggcggagacatctccgggaaaacaaaacccgggcagcgtggagagcgcaatattgcgtgcgcgcccaatgcctgattcgagcagccccctgcaccacacggggattgtgtggacgcgacaaacatcataaacgcggcaagctgccgtgaacccaccgacccggccgagcttgatattgataatcttgcaggcaccgatctcgatcgccttgcgcgcgtcgtataagatattgctttcgatgtatcgaaatatagggaggctgtttttgcttgtcaagggatattatgcatcgtaaagcaccaccggatttttcccccgatcgccgtcgactattggaaactgatcttcgaatggatccggaacccggattaccgtaggatgtttgccattccgttgacggcaccgccgatgtctggtccggatctgtccaaggttcgcattctcgcgacatggcgtgtatatgagaacgcctgcaacgggtgcgtccaatgctgcatccgaaggtcctgcccgttgctggacgccgaacgaaacagtgcagaagctacggttcgtttttctgccgctatttcatctgcgggcgatatccggaaaacgaagcgaaaatccactactatgatttgcccaagtgggaagtttgcgagggatcccgatatttcctttcgtagaggcccggatcgtatggggccttccgatcagggcagtcttcgcgagggcagagctgacaactggcaaatccttcctcgtttgcgaaaacaatgcccgagagggatttgacgggcaccatgagcagactctccgtcagctctacgccgatggtttttcgggtgtctcccagaagttcaaaaaggacccgttgctcctccaggggccagtcaggcaacgagcccggactcatgcgcgccgttttcgccaggccgaagcgttcctgcagatgccgatccaggaacgagcgggcggagatgaccacggcctgattgattgcatccgcccagaaacgttccaggagatcggtcttggcgttcgcccaggcatccaattcgcggcccgaggtgaccacaaaggcaaaaaaatggtgaaggttgtcgagattcaccttcaggacgcggctctcgaaccggagttccccggccaccacatgccgatcgccccgcgactcgatgaaggccatccggtagatcgcccggggatgggcgaccgcctccgcctcccggatcaacccttcgacctttgtcgcatgtccgctgccttccttcaggcgcaacctggccagcagggacggccgatcgattcgatattccagaagatccaaaacaacgcgttccatcattcttctgccttcccgctcaggagatcacaggattcatgactgtgatg

SEQ ID NO: 102 - DNA, 5280 bp, Artificial Sequence
  Synthetic
gtaacccgttcctgtttcttgcaaaatagaaactcctttgagttcctggtcgattccataactgctcatcgactcgcattacccactccctctctcgtcaccccccccggtgaacggttaccatttctaagcaaattgactaaaattgctgcaagtagagtaccaggtgtaaagttttgccggaccatcaccctgcttagataaaccctttttacctcaattacagacccaccgtatttctctcatgtctctgtcgtatgatgttcgcatcccggcgggtcagaattaaatttgagcaaacatgagtgcctttgcgggctccccaacgaaagcaaaatgcgcaagtgtgcacccgaacgggattgtctgcaacggattgcagtgccgcggtttaacataaaactattactgaaaatatggagcggctccgccgaaccacaaaaagacccgatggctttatgaatttggactgactctcatcgcttcggaatcattgcgacgccattgatgtcttcttggagcgagtgtatatttgtactcgtgttttcaaggagttgatgcatgaccaaatcggaacttatggtagcgctgtctcaggaaatgaatttccccgtacgaaaagcagaagaaattgtaaacgtagtatttgacacaatgacaaagaccctcgaagacggaaatcgcattgagattagggggtttggttcctttatggtcaaggaataccagggctacacggggagaaatccgaaaacgggtcagctaatatcggttactgacaagaagttaccttttttcaagcccgggaaggagcttaaagaaaaagtttcaaaataaggttccctcttacttgcctaattgcagccgagcgaaatgcaaccctcgttcctaagaactgatgaacaaaaagatgctctttgttcattgcagctggtttcagagcagttgcccaaggtccttgataatcctctgaactggaagtgggtaataatagccctccacaatgctttgcaaggattcatggtattggctttgaaaggttctgatagccttaatgtactgtcgaaagatagctgcgttgagtggctcgccgcctatgacaatcccgacagttctctgccacgccttaaaatagatgatttcatgcgactatataagaaaataaaaatgggtaggggtacctacgataaggaaatcctgaaggaatccgctgttccgagaaaacaatcggaccttatgcttatgtattccggtagcgtacccttcaaacccatcggaacccagtctgacagcgttaagctgctccaccatctgagaaacgattttatgcattttctccccaaaggctggtccatagacctctccggtcttcccaaaatggtgaacgactgcgttgatatcatagaattccttgccttcgaatgccacaatgttgtgtggaacagtgccgaccttcaaaccgagatacggcaacttctagataagatacgactcgccggagaagccttgagggctgttcgtgagacatgactatactctcagactacgaactcatggcgatgttgttcacaataatgaaatgtcaataagtgcctccctgttgaacatgacttcaagtgtggggaaatcaaagccctcttgtgcagcaaatctattcagagagagtagaccgagcgctcgagcaccaatttgcaactccgctcaataggagcaccgccatggacgctgaaggtttttgctttgcaggtttctgggcagaccaagaaaaacgtcgtgccgagaagaaagccaaggaagagagagaaaagttgaaagctgagtacgaccagtggtgcaaggagcatggcataccgcctccgcctgataacgagttatgatatctatacttaagatagtcgggcaccgaacgatgttggaccaatatagggaaaagaatttctgttcaaccgacttccgtttgggctacaatctcaagtagctctccaattcttctaccactgacaggcaatcgccatgataactctcgcaatagactatggtgcggcaaacataggaatagccctggttcgtaacaccaaggacggcaataatgaacctctgtttgcaggaacagtagttattgatgccaaccgcatcaaagacaaggtcgaacctcgtgctggcatcagaggactgagacgaacgagaaagacgaagagaagaaggctgcgaatgctgggagaggggctccgtgggcttggcttgggcaaggaagagattgctcgaatcgttggctttgccagcaggcgtgggtataaatcgctctttgacgacccggatgaaataaaagaaggtgatggctctggctatcggtgcacgagagaggaattcttccaccagctggagcttgaattacgggaaatcattaaggagcctgagctctgcaaaaaagccctcgcggtctgtgaaagaattctcaaccgcaaaggagaacgctacggcgaaataagacccctgagaattgacaaccgcggcagaagtcgctgtgcgtgggagggctgcaacaaggtgacgccaagacgggagaatgctaccggcgatgcagtggtgcagcaactcgtaacctattttcaaagtccccttcgtagggagcccgacaagctctccatgcttgagcaggcgattgccgaattggacctcatatccaagaatctccggggttccaacgaatccaaatccagcaatgctcttcgcaaacgagcgagaacgattctacgcggtctgcatgctgagttgccaatgcacgatgaggaagaaggcagcgataaagagagctggaagtatgtggaaaaggggatagtcaatatccttgaaaacaagggcggaaggaaccgctattgcagagagcatagtagagcacacgtgcaaagagtactggagggcaaaccatctgaattcaaaagctccatccaggagtctgacatcatttccaggcgcgagcaaataaccttcagtaaactatggagatatatcgaggcgaggctcctcccgctggctcccagaggcatcgacaggattgtcgtggagcgtaccgcattcgacctgctggcggggaaacagaagaagattcgggatgcttccagcaaatcggttgagagtatctatcagtatggtcctatgtatggtttcgccagtgaaaaggaaatgctgcgcaaggagttcggcgggcgctgcgcatactgcgggaacccttctgagaatctattggaccgggagcatatcctgccaaggaaggatttctttttcgatagctacctcaatattctcccctcctgtccacaatgtaatgccgccaaaggagcctctcttcctggagtgagctctctcagaattcacgaggacgcataccgtaactatgagagctacatcaatggcttgaagagcaagggacctctccatttcctccacaccgaaaagaagggcattctgaatctcatgcgagaccctgacagggcatgggaactggaacgataccttggtctcattgccaataatttcgcatccattgttcagacccagcggggtccacgcccttttgcacggtacttgtattcaaagctctcccagaggcagaagaagcctccggagattgctttcagaagtggtcgtcacactgcattgtataggagcgccgcctatccactgttcagcaaagctcaggagaaggcggaccaagatgggaacgggcatcctgtgaatcatgcactcgatgcgctcttactggcatgtaaactgcctaagcctgagccactggaagcgcggggaatcaatctcggcaatatcagtgcatgggggaggcaagttcgagccaaagctccatcagcaggcgagaatggcattccagtcatgcctgcataccagtggcgcgtgccggggtttgaagccacagatgcacacgggtatataacggttgagatggcaatgatgaactggaatcaaaaggacggggcaaccacaaaacaggacccgtatggttggtctgaatcaagacaaaagccaacaaagagagtctctgccaaaagcctctttgatgagctgaacgatgaaaagagtaagaagaatcccgctgagctaatcagccgtatctatcatccagctctgcgctcagcagttcaggatgcgttcacggcttctcataaccgtgctgacgcagccgatgctctcaagaagtggctgagagattcggtgaaaaacagtcttgggagttcaagcttttcgcgccatcccagcgacagtcggcggaaactggaccttgagaaattcgccaacgacgagacagaagaaattcctatggtgataggggtgaaatgcctcgataccggtgttgacggaaagatagatgctgctcgcgtagaccctcaaacggggaagacggggcaccgttacatgactgaccctgccaataagggagtattgctcgcctatccagcaacacggtcaggagcgtgtgacagaagaaaaccatgcatagcgggtatcaggcagaattattcactcaaaactgacggtacggcttttggaccactcccaagggtattggagcgaggcgtggtctggggcgaacaaacgtactctctcaaactgatggagaccgccttcggtaaagaattggaacagtatctctctcaatgcggttttcacagctactgtattctcactgctggctgtgtggtggtctacgaggacggcaccgagagattcatcaggaacttcgacaagagcaaagacttcaaaaaggcaatcctgagaaacattgtcggtctgaagcggactccgttctccaagcaagttgcgccactaaaagtgttgacacgagaccctgacagggactaagaattaaaaaacactcgctctttgacaaatcgttcgatattttcagctccggttgaaaagagcatccgtctgatagccatgcactccggaatggggcagttccggctcttgcgactcaatgggtgtatgctcattgagccaactgtcagacacgtctctctgagacaggatgtgagcccttatttacaaaaacaaaagctgattcttccgtagtcgttgcgactaaacacggatgccgaaaggcatcattcgccaagtttcaatcaagctgattcttccgtagtcgttgcgactccgggaacgatttgtcaaagaataccctaaagttatcccatgtgttttgcgaacctccctgctcttgaccaaatcgaggctccctgattctcgttgtgcgtttaagagctatcg

SEQ ID NO: 103 - DNA, 4841 bp, Artificial Sequence
  Synthetic
atgctgctattcttttagagaaaaaaggaagtatttggtctagaacgatttcttattgaagaagcaggaaattgtgatttggtgggagcccaagtagacaagagtcgatgcactctgaacaagccatcatatggtgggtctgggcacagatgaaacagacatagatcgtcatgaggggctcctcgtacacttggccgagttttcttcagtggttacgtggtttaaacagatacgcacctcgttggcgagttgtgttttgagcccggaggaattacctgatgtgcatcattatccgcaataagttgtttttgagaggacctctacccaatcatttggacgagaaacgaaggaggcattgttgtgaatgactcaagtcacaactcgaacaaaccagatgtacttaatctaacactgtggacgcgtagggctttatgcatcccactgctggcgcttgcggcgattcatctaatctggccggagttagcaattgatgcagtgttccttggcctgctagccttagccgcccttctctggttcttcgacgtcgagagcatcgaatggcagggcatacgggcgaagcggcgtgagatcgcccgtgccaaagaagccatagatagccttcctccccctcctgacaaggccttgccgttgaccgtaccgacactacgatttgaaggaccatcgcccgcggagatacgggccggcatgcctcatccaattccgattgaagctgagcttccatatagtctaattgagcgactattcctgaccactgagcagattcgaattgagctcatagtccttgcaggaaacggcggatatcttcctctggttaggccttgggatcgatattcgatactggagctgagcagtattctaagaaccaggaatctcttgccccccgcactcgttgaggcgattgctacggttgtaaaagcccccaacggaattgcgcatgtaggggtgatcgatcacgcctcagaccttgctttagatgtcttagcgaagctacgaaggatccctcgaaactacatccgaattcgcattgaggatgtagaaatctttcgtgattgctcgcttttaacagtacacgctacccggggtgtaatggtgacgcatatagaccaaagcggtattatgcatccgccacaagtatttccgagggaacaggtctttctcaccggtcgcttttgcacgtgggaatggaacatggcgcgcgtattccttgaagaaggctggtaccgagatttaatctcgggtgagccgaaggaagcatggtcttcatccgcaacttttggcggtcgtgagtacccggagcaatgggggctggaaaatcgtctacctaggcccgagctcgggctggagtaacgtctaattaagaaaaggggactgtatccttttccgtcatggaatcaggaaaagaaggacgatgaaattctttatacgattgctcatgaattagctcatcttttctttgaacatgatggagggggtagggcttgtgaacaagaaaaagaagccgacagaaaagcaataaaatgggggtttgaaaaggaactgagagctacacctcacaattatctttttggaacagggcttttgctgaaaacctttggtgaggttacccttgtaaagcacaattggaaggggaaaaatatgataaatgaagcaacatgcatgaatgttatagagtggtacaacacaattgaaaaccaactaatagattttttcaaatatgtccctccccaaagtcagaatatgagcacatggtctccccggctttccactttgatcgtcgagagttgtgggctgattgattctttgctacgatatatttcacctccgaaagtccaactgcgcggaaaagtgaagagacgagaaaaattggagctatccgactttgcagaactgtattctattgaacgtaagctacctaatcgcaaagtaattctcctaatatcgcctcctgagtaccgtaccccatttgatgtttggttaaaccaggggaaaggaatttctttcgagtccccatcatggtggacaacaaataatcatcttaagcaccgcagaattgattgtttcacggaagccactttagaaacagcaatcaatgccattgctggttcactcgtaataattgcaacgacaccccaactgattcctgtactggcacggaaaggatatttggatttaagtgatcgacatgcctccagtactataaaaaatttacaaaattattatggcgaagtgataactttagaaacatctctgtttgcaatgagttttagcagtgaccctttgccagataacattcacgagttcaatcctcttctctctggaggaagtgccaggttaaaagcgttttttgttagaccttaaaatctggggggttttatcttcaacttgccctctgtattgatatttgggtacgttggtgcaaagagaaataaaaagaaacataagactttaaatgaggcggggtaaactagggccgtgccaaggcaggcgggatggtacagaagttgggatgcacgggggtgccagtggcgcggtttccggaggtgacagagttaaatggatgggacaaggggtttgcatttacccctacgtccccctcatgtctctgccttttatgaagtgccggacacgaatgacggtcacggacacgttttaatatcttggcacaaacctaaccgtggtatattatgtgcaccaggtgaagcgaaaaagagaatatcagaacgtttaggatagaggggctttggagaggatgaaacaattcaacttaatcaacaacgatccactgataaccaatttaaaagtgaaggtggacaagctccaaattctcattgacagcctgttccaaaaggcatacaatccaatcgaaattagagctattcgcaattaacctcaaacctattgggtgggatatggtgtaggaatgatttagaaccccatttctgaaaagggaatggggttttattgtattacatccgtaattccttaaaggatatggagacaaaggtaacgctatccattgatttcggttacaagaacatcggccttgccttggtaagaaaccaggagggaataaatactcccttgttcgctgggactctcctatacgatccctttcaactcagcacaaaggttggaccgagggcagaactccgaagagggcgccggaccagaaagacaaagagacatcgactaagctctttgaagaggaaattgcttcttttaaatctgccagatgaaacagtcaaacagtttgtcagcttctgccaccggaggggatatagttctctatttgaaagggaagagatttctgagaacaaaaaaaccaaaccagaagaagaaatcgttttccgttttagtcgggaagaatttttttctgccttagaaaaagagatagagaagctgttacctgaagaaaaaaggaaaacagttcttaccatatgcgaggatattcttaaccgtgccggagacccgtctaaagaagttcgcccactgagaattgacaatcggggggtctcccggtgtgcctgggacggatgtgagaatgtcacaccccgcagggataatgcccttcgggaccccatgtcccaattcgttcatacggtatttgccgcaagtctcagaggcgatacaaccctccaggatgaagttgcaagaatgttggaccgtatcgcggttttgggaaaacgcctccgtcatcgcaaaggccccgatccagataaagagcgcaaggctctcaagggaaagattagcgaagaacttaaattgttaaaaaagctgtatggcctaaaccctgatttgactgaagagacggctactccttgggcgaaaattcggcagaatataacgaatctgatagaacagactggagggcgaaatcggttctgccgttaccacagttctcaatatatgacccacttcatggaaggaaaaccgatacccttcaaggcaactttgaccgaaagagatttggtgtctcgccgggaagaaatccttttccaaaagatgtggcgttatatcgaggcgagaattcttcctcttgtccccgatggcattgaccgtgtgattgtagagcgaaccgccatcgaccttctggggggaagccgaaaacagcgtcaaggcattatgaacaaagaagcccttgaggagatgtatcagcatgggcctcgatacggattcgggaatgaccttgaaatgctgaaggctgaattcgatggtctgtgtgtgtattgtggcaggccaaattctgaattggttgaaagagaccatcttttgcctcagtccaaatttttcttcgacagctacctaaatatagttcctgcctgcccgccttgcaatcggaccttaaaacaagctgcctctccaggaggggcttcactcaggattcacgaacaggcatacgatgcctattccaaatatgtgacttccaagtttacgaataaacctccccatttgtttcataccatcaagaagggcgtcctcaacctcatgcgtgagcctggcagggtctgggaagcggagcgttatctcaacctcatcgccaatcagtttgcccaggtggttgggacccagcgaggacctcgccctcttgcccgttaccttagctggaagatttcccaaaagttcggggagaagccaaagattggatttgttaatggcagacacactgctctctggcggaaggctgcttaccctgaattcgataagtttagggagaaaaaagagggtggtgttatcaaccacgccttggatgcactcctgatggcttgcgacttgccggacctgacttctcttgaagcgaggaacttgcagcctggtttgat

SEQ ID NO: 104 - DNA, 13103 bp, Artificial Sequence
  Synthetic
accacgcggaccgcctcggcgtgcccagtgtcgctatgacagacgctatcgtagtcgggatcgggcacatggccgcccgtgtaaccgacctcggtttccgtgacgccgtcgacgcgtcgaaacgcggcttcaacgccccagaagcaaccggctgcgaacgtggccgtcttcatgctcttctccttgttttccctagtggatccgtctttggacgaggtttgggcttccgtcgatcttgtaagcccctcgtcgctcgagttcccggcgagggtcacgggcgccgacccggccgcgatgcgctcccgctgcccgacgtcgggcagcgtgccgtcggccgagacagccgctcgatagccgagcaacacggtggtcaccccggcgacgacgaccgccccggccacaatcagagccgctggttgaatacttctcattgcgttctccacggaaggcaagaggcttgctccggagttccaagttcggcccgtgcgatgccgaccgccaggcgacgctgcatccgagccgcgatcctcggcgagcaggacagctcgacgggacgcatcgcccagccgaatcgagcgttcataagccggccggcgactggctcattctcgccgcgaaaccaggacattctcgtgattcccgcacacgcggtaacattctcgtcattcccacacaggcggcagcattcgcgtcattcccgcgcacgcgggaatccagtgggttgcgtcaatagcttggacccccgcgcacgcgggaacgacgtccttcagacggctgaagtgatacggctattgctattctacccgaccgaccggggcagggtaggtcggctggccgcgagcgaacgaggtattgaatatctggggtgaatgccgaccggacacatcgacccagtgcagtgccgcccatgggccgttcagcggttttccccgtcggcgtcgggcacgatctcgatccaacgagcgtccagttcaacgcccgggccaccgcgggtgcggtgaccttgcacggccaggacatttttgccaatgtgcagcagcttcagttcctcccgatcgagggggtgctcgaccacggccggacagtgccccgtggaatggatcagttgcgtaccgttgagaaagatacgcacgtcctcgtcgtggcgatagcggaggacgaaaccaaccggtgtcgcttctagctggaagtcggttcgcagccagatcggcggcgacggcagcgcgaccggcccctgttgcctcggtggatggaactgctcgaccggccaatcggaatcgtcgaagtcgatcgtggtccattcgggcgaaggtggttcggtggcgtagcgccatgggtgtcccgacgaggcggtgccgcggatgccctccaccacgcgtgcccgatccagcagccggttcaccgtcaccggacggaacgacgtcaagccctttctcggtctcagtggtcgcgacgtttggatgatgagcgttggatcgatcacgtagcggcccaaacgatggccatagatcgacaatcccgccccgtcgctgccggagcggaagaccagggggatgtagggtttctcgtaaatcgcttcgcgcacctggggatgctctcgcagatcgatcagcttccggcttaggtagccgtagcttccatgatggaatcgtcgatggtgcgagagcacgccgcgtgagtcggccggatcgtccggcaacgggaattcgcagagcgcatttcccagcgaagacacttccacgcgacccgggaaagtccgagcgggtcccgatcggttggtgcctgcctgccaggccggcgatcctcccgccgtggctgcgccgaacgtcgtggctgaattgattgggctcgcatccgcccgtgtggccatctcggccatcagcaccaccttcgtcggcagggcatcgcgaatgaactcgggcagtgccaaatgatactccacttcgcaattgccgtaggcgtggaacttcccctcggtggtcaaccagtcccagccgaggcgatcggtgcggaacttggcgaactcgcgtggcgcgaaccgcacaacgaccaactcccggcccaacacttccacgcggggcgagtcggcgaaccgatccagtaaccccgtggtcacatctgccgaggcgtcggccacttgtccaatcgcgcttgaaatctgcccggcggccgtgccccgatcaacaagcgtcgaacccccgtctgactccgccgcaccagagtgatcaatcagaagattcacgtagttgaccgccacgcgacggtcgctggcatcgagcaactccaactcgatcgcgccgatcatgcccgttgtcccgggcatgcgtacccgaagcggttgctgaaagctcaccgtgccgtgctcccaaacggcggggcgcgagccgctgccaccgtccaccggtcgtcccagctgatcggtcccggtgatccgccaggccagtcggggtggtcctggagcggtcgagtagtgagccgcgaacaccgacagcgccacttgctcgccaggggcaacttgcagcatcggcggggcgtccacgccgacgaagtcctcgccaagcaaatcgctggggcccatcccctcggcaaacgcctcgtagccgaacaccttgggcgagcgatcggcgtggagcaaaccgtcgtgccgccactccacgtcgtacaacgaggcataatacatgccctggagcaggtcgtgtcggcgcagttgcgttaccaaataacgaaaggaccacgacacatcggcatggacgccacctggtgcaatcgccccgaattggctgcaaaccagcggcgcggtgccctgacgtcgcccgggcacgaaaagggccggcgaaccgggacgcgtccgtgagatcacccggttgatgtgttcgcgcgcaatccaatagtcgtcgatccggaattgccaggaattgacgtcggtctccacgtgatcgccttcgccggaggccatgtcttcgatcagtcgcgaggggtcgagccggccgcgaaccacctcaaccatctccgccacccagtcctgcaactgctgatcgcgacgataccacttttcgcccagcccccaaccgttgtggaacagggtccagccgacgatcgacggatggttcacgtcgcgggcaatcaccgcgcgcatcgttcgttcccacgtcccacgtgccttggggctgctctcgtgcgtcgagggcatttcgggccagatcatcaaacccagccgatcggcccagtagagcttccgcggatcgagggctttgactcgcgttcgcagaatgttcaaccccaaccgtttggccgcttcaatgtcggctcgtaagcgaccgtcgctgggtgccgtgtaaagaccgccggggtagaagcccggatcgaccgcgccacgaaggaagacgggcgtgccgttgagcaggagcatctcatacgcggaatcgcccttcgcgccgcgccggagttgtcgcaaaccgaaatagctccgcaccacgtcgcggccgccatcggcgtcggtcaccacgacctcgatcggatataggtgcggatcctccggcgtccaacagcgcggacgatcgacgccgatcatcgtccggcaggtgcccgcaccatcttcgatccgcgccgagcgttgcacctcgcggacgtggggcgacggggaatcgatccgcacgtcgaccgccccatccgctccagccaagcctacttcggcctcgacgacccattcgccggataccagcaccggcgtgagcttcagttgctcgacgtggcgttccgggcgtgcttccaagtaaaccgtttgccaaatcccgctgctcggcgtgaaccagggtggtccctgaagccccaccggcacgtcgggcgcggtggcgtcgaaagcccgcacgtcgatcacggcctcctcccccggggcaacgtgctcggtgacgtcgaaggcaaacggcgtgtagcccccctcgtgacgcccagccgcgcggccgttgacccacacgcgagcttcatgatcgacggcgccaaagcagagccatacgtggcggccgcgccagtcggcgggaatcttcaccgagcggcgataccaaccgatcttccttccgcttcggtcggccacacccgacagctcgctctgccaggggaacgggaccacgatcgatgtcggcaattcgcgccggattgccacggcgttgtccgcccgcgcgccacttgccttcgcgtcctccggcgccccccctgccgccgacggccaacgcgccagtcggggccactgctcgcggagccctcgattctcgtcgtcgaagcggaactgccaccggccgttgagattcaaccactcgggacgttcaagttgaggacgcgggtgctccggccgcgggacagactccgactcccacgccgcgccccggccgacatgcgcgacaaagcagcacgcagcgaggagtggaatcgcgcgcttgagcgggaattgcatggggggatcaattgcgtgtcgtgccggccgagaacaacgtcgcacgaagaagattatcgactgcccaagggccgtctccccaatgccatgcccccggcggcgtgaggcacgaccaaccccggtggctaaggccgggtaatcggcgtaatcgataatcctaggagcggcggtgcccattctccgaatccagccaccggcggcgttcccccatggaacgcacgcgacaggccaggcagggcatgtagaccaggccgccacaacccgggcagcgttccagcgggccggtcacgtcgaaggcctcggtttccgatggtcggcacgaacagggtgtggcgcgacgccgaccggcggccaccgcgccaaccgtcccgcggctgactcccaccaggcgagcgatcttacgctgcgaaacccggccttcctccaacagttcctggatgcgttcaatcttttccgttgcaatcatggctggttgccctcgtcgtttcgagccccgatgtgcagaagtgaatgtgtacgcatgttcatatcactaaccgggcatcattgcaatccacgaactggccaccacgcccgttttttgatgcggatcggcctccgcgtggccggaatcgcccgccaagccccactttagacccggtccagtggatcgcgggtggagcgcgggatgagccgggggctggcgtcgcggaacgccgctggaggagatgaccactcgccgccggtggaaagggctgacgtttgaggagacctggccggtcgcaggcgttggggcggtcgtggatttgtcgttcaggtcgaccgcgcctcggcgacgatatcactcaccacccccccccaacgaacgcaaaccctggtgtggatcaagatgtctccggccttattgaacgcggtacttgtcgtcggctttcttgccgtttacgtgatggccggagaggcactcgttagcgtcagacgccatcgccggcgtcggctgcactcggcccacgggctgaacgatccccattggacgctctcggccgcggaccgcctgccgcacccccacggcaaggcaagcaagccggcggcgtaagaccctggccagccgggcgaaagatagtctcttgcaacgtccgcgctaccgtgacgcccctgctactgcagcgtctcgctccgcttcgctgcctccagcagcatctcgcggcgttgctcggccgatagctcttcgtcggccacggccccggccgtctccagcagcgtccccagttccaggtcccaaaggcgggccgtgttgtccttcacgttgaacgtctccccgctaccggtgatcagccacttgccgtcgccgctcagcgccagcgtgttcaccgggcccacatgaccccgcagaacccgggccgtggcgaccggatccgacgccgacacatcccacagacgggccgtgcggtcgtagctgcccgatacgagccaacggccatccgggctgaaggccagttgttgcacgcgggcttgatgcccttggagtacccggctcgactcggccaccgactcggcctgcaagtcccagacgcggaccgtcttgtcgaagctgccgctggccagccagcgcccgtcggggctgatggctacggtacccacccagccctcatgcccgcggagaacggtcggatcggcacccgggtcgatcgcgctcagcttccacagccggacggtgttgtcgtaactgcccgaggccagccagcgattgtcgggactgacggccagggcatcgacccagccctcgtgaccgcggagcacgatctgttcggcggccgggcgacgggcagccagattccaaaggcgaatcgtcttgtcctcgcccgcagtggccagccagcgactgttggcactgacggccacggtgagaatcgggcgtcggtgtccgcgaagggtgatcggcgcccggctggcggcgggcatgctggcgactggcattccgtgcggattcgcgtctgccggcgtggacgtgtccgccgacgaggcctccgataatcccgggctgcccgccacacgggccccggtcacggcggccagattccagagccgggccacgttctcgccgccgcccgcaccgtcgtccagcgggtggcctcccgcctgccgcgaggcgttggctccgcccccggcggtgatcagccactgcccgtcggggctgatcgtcgccgcattgatccgaccctggtgcccccgcagcacgatgggagccgccgaggggtcctcggcccgcagattccagagcatggcacgaccgtcgtgcccagccgaggccagccacttcccctcgggcgtcatcgccaacgcgctaaccggaccctgatggccccgcagcacgtggcacgcttggtccgggctatccgcccagaggttccagagccggacggtggaatcggcgccggcggtggccaaccaatgcccctcgggactgaccgccgcgtcgagaatcggcccgctgtggccgcgcagcccatggggtcccacggcggccagggcgtcacgcacgatctgctccaacccgcggccaatctggagcccctcgcgctgccgggcgcggatcgattcccgcgccagaaacagcgcgcggtaggggtgcgtggccagcaactggcgcgagtcgtcggccagttgccgagccagggcgagccgcgcgcgccgcgccgtttggagctgctgtccctcgacgatcctccgtcgccgctccgcctccaggcgttgctcttccgtgcggcgaagctgatcctcgatggccagccgctcccgccgctgggtttcaacctgacgtcgctccgcttcgatctgccgttgccgccgagccgccagtttcgcgcgatgctcggccaattcctgggcaacctgacgttgctcttccgcccgctcgcgagccgcggccaactgcttcagcctgaccgacgtgtaggcgtagcccaaaccggctcccagggcactcaacaccagcaaggcggccaccagcgagacggccgtgctcaacaccgcatgccttccgcaccagcgacgcagccgctgccagtcggacagttgcttcggatggatcggctcgccggccaaccagcggtccagcgtgccggccgcgcccccttgccctccgttgaccgggcgaggcgaacactcatgggtgaaatgcatgccacacgccccgcaggtcagctccacgggcgtctcgccggcaagtgtctcgatcgattcggcgcacagcgggcaacgggcccgaacccggatacgcggcgccgccgccgtcgcccgaatcggcgagccagcgttggcgggttgatgtgactgggtggacatgggcgggctggggttcgcgggggagggcactcgctggacgcgaccaaccggcgggccgcgccgatcgccgtgcccctaacgtggcctcgtgctttcgcggtgagacgctctgggcccccaccggccgggcaaccggaaaatccggcatcggccgaacaggggctacaacagtcagatcggacaccaccggccaaccgacccggaaaacgggcggtgccagtacagcccgcacatccggaacatacgggaaatcgcataccatccgcgtcagggatacgaccgttgcgtccggtcggcgaagcgtggccgactttaccgcccggccgagccgatccagcgcgtccgtccaacttggagggcgtagcgcgcgacgccacccctcgcggaccccatttttcacgccttatttcgacgccgcgaatttttggataggtaaagccctttcttccgggcaccggggggccaccgaacccctcgccagacggccaggcttgcccctgaaaaccgggaataaagcacttcgcaccccccgtaagggccgattatggtgccggaaaaatgaacgcgctctcaaaatgcctttccaaaaacccaaccctcgcgcctacttattagtgggcagggactccgttcccggcccagtttgcggcccagttgctcgcagcaatcatctggcagcggctcatcgggtgatttcgcaggacacattcgcgatggcgaaagaaaccggcatcccccccgaatcacgagtcgaccacgccgaattcgtgcgtctgctgaagcggcatgagcggcggctgaacggctatgtcttggccctcgtgcagaactggaacgatgccgacgacatcctccaggcggttgccgtccgtctctgggagcaattcgacgaataccgaccggacggcgacttcggcgcgtgggcctgcaagatcgcctactacgaggtgctcacctaccgcaaacggaagggccgccgcgcgctgcaaacgactcccgctttcgaccaggccgtgttggaagacatggcggccgccgaaaacaacgggcccgggcctgaaaaggcccgccggcgggtggcacgcgccaaaacgccccaggagcccgtctgaccgcgaccaccggccaacgacccaaaagccattgactaggccgaaacgccgcgacgcgacgccgcggacgatcgctttctagggcgtcgccccgaagtatgggcgaatggtgggggggctaggcgccgccagcccggcggcgtagcttggtctggcgtgggtgctgttctttgacaattcgagctttcaaggttgcggttgaaaagagccacgacaggcggctcgcacccggggattggacagttcccggcttactgcccggcgggtacagagaagcccgccacacggtcgcccgtccatgtggtgagtccattttgagaaacgctgctggccctgacctttcaacagccgttgcaacgctgacaaaccacagatcatcggctggcggtgggaggtttcaaccaacctgacctttcaacagccgttgcaacccacgctggccgcttgcagccgcccgtcaatcgtcgtttcaaccaacctgacctttcaacagccgttgcaaccatgctgctacctcgttaccagtggatcgccacagtttcaaccaacctgacctttcaacagccgttgcaacctgccgtgcctgccggcaccggcaccacaagaacgtttcaaccaacctgacctttcaacagccgttgcaacgcgagtctcccacgctctacgccgagcacgggagtttcaaccaacctgacctttcaacagccgttgcaacgtctggccaactgcgatagtcgtccttggccccagggtttcaaccaacctgacctttcaacagccgttgcaaccaaaatctgcgagattcgcggaaagacagtaagtttcaaccaacctgacctttcaacagccgttgcaaccgcatcccatgtcgcggaggtgccgctcggcttgggagtttcaaccaacctgacctttcaacagccgttgcaaccccccggcacataacccatttgccggtaggtgcttgcggagcatgttccgcgaacctatggctcgaaggggtaacgatagctcgaatgaaaagcatggcgcgccgtaacttgaagcagcggcgagggttccgcgaatcgcgaacctcccgggtttggctgcgcgcttcgggttcgcggagatcggtctcatgacccataccctggcaatcgacttcggcgtccgtaatatcggcttggcgttggtcgcacatggagacgaccgccagccggctaatcgcattctatacgcggcgaccgtcgtcgtcgatgcaaaatggctcaaccaagccgtggccggtcgcgttgcggcccgagggattcgacgcactcgcaagacgcaccgccgccgattgcagcgactgggccaagccctcaaaggactgcccgaggcagagcacttggtccgcttctgccggcgtcgtggttacagctacgacccacccgaggaagacgacggcggccagtcgttccacttgccgcggggccgcttcttcgacgcactcaccgatgagatcgagcggacgatcccgcccgagcaccgccagcgcgcgttgaagctatgccgaaagcatctgaatgctggccggcatcgggaagccgaactccggcccgcgcgcttcgaaaaccgcaaccgggtaaagtgtcgctgggcaggctgtacgcgtaacgtcccgcgggccggcaacgatttccgcagccgcctccaacaagcgctctatgtttggctgaaacccgtcttcgaccaaacggagaatgcggcccgcctgcgccggtcggtcgatcattggattggggagcttgacggccttgccaggtggtgggccaaatgcgaacggctggacgcggacgcctgcaagcaagagcggaaagcggtcaccaagcgacgggggcgcgtctacaagaatctgctggcccggattgaccgcgaggtggccgaggatgctgccgagagatttcgcgaactttggaaaaagacctaccgcggcaacctgaacgacatcgtcaccggcaagcaaggtggccgctgcacctactgccgcaagcactccgatcagttcgtcgacgagttcttggctgggcgtcgcatcccacatcgggaagaaaccaccgaacgcgacctgattagccggaagcaacagatcatcttcgggcgcctgtggcgattggtcgaggcccggcttctgcctctggccggcgggaccattgaccgcgtggtggtcgagcgggtggccttcgacgtgctccaaggccgtcgcaaagcgcggcaggaattgccggaggcgcaagcggctgaaatgtattggtatgggccacagcgcgggtttacgtcgcggctggaaatgttgaaggccgagttcgacggcaaatgcgcctattgcagcgcggaagcggcggcggaagtggagcaccttttgccccgtgctgaattcccgctgaactcttacttcaatctgctgccggcatgccgcgagtgcaaccgaaagaagggatcgcgaccagcttccgccgcgcggatgcaagtaacacccgaggcggtcgcgagctacagaaaatacgttgaccggcttcgcgttccccacttgttccacacaatcaaaaagggaatgctcaagttgctaagccgcggcggcgacctagccgtcgccgagcggcaactgggcctcatagcaaacaacctggtcggcgtcacaaacacacaacgcggtccgcgtccgctcgcgcgatacttggcaaccaaattggaggatacaacagggctgcgccccagtgtcgacttcaccgccgggcgacatacggccctctatcgcgatgtattactgcccgccttcgacaagcccgccgcgaaagaggccggcgaattgaccaaccacgccatcgatgcgatcgtgctgggctgccggctaccgtcgcccaccgtgctcgaaagccagaagtggtttcagacgccgagcggcatccgtgcatggcgccgtaaagtgcgcgaagccgggcccgagttggccgacaacgtgccgcgcgtcgaagggccggagcccatcccgcacttcgaaaatgacctgggcggaggctacctcgcgctcgacctgagcgcttttaactggaaccaaaagcggaaatcgggccataggctcgatccgatcggcctgacaaacagcgatgagccgatcgaccgggaaccggccgccaaggtgctcgacaaactgcaacaggccaagagtcgagagggccagattgcgaggattgcgcatcccgccctacgcaaggccctccaggtcgatccagggcaggctgcggccgttttcgtccgctggctccagcaaaccgccgttgccggcttgaagggcgcccccatgagccgacacccgtccgaccggcagcgcgaacaagtcatccgccaattcgccgaaacgcccgtcgaagccttcctggcaaaagaggcgactgcggacctcccggggatcatcggcgtgcgctgtttgaaagccagttccgccaaggtcttcgacgtggtccgctgcgatgcctccggccaagtgttccaacactacaagagcgacccacgataccgccggttttacatcggatacaaggcaacgaaagcggggccgaatcgcgcgaagccgatcatctattgcgtcaatcaactctaccgggtgtgggaacgcgtcggcgcccgcaatcttgaactagacttcccggccgacagcccacttcgcggccgaccgctcggatcaatcgaaaacgaaaaggcgtttcttgcacgctggcaggcggcattcgatcaactctgccaggaacagggcatcgcggagcggtttgcggtgcatcagggggccgttatcgagaagaccgacgggagccaccttcaggtgcgcaacttcgacaacggcaaaccatggatgaaggcggacacgttccgccacattagccgcgtgtaccgctcaccgctgcaattcgcggccgagcatcgggtcgaaagtccgggctaattcgccaccgaccgggccagaatacgcgctccgcacctacctggcgcgactaccgccgccaggtaggaaatggaccgcgccgcgtcactccaccgctagcgccaattccgcgagtggcacggacactctctccacgatccagggccagcgcacactaagtgtgttttccggtaaggacttgcatcaggaagtcgacactccaggcggccatgcggcgtttcatgatattgctttccttgccggggtgttgcttgatcaggct

SEQ ID NO: 105 - DNA, 3086 bp, Artificial Sequence
  Synthetic
tcagctatccttcgtgccgcgctgaacaaagccaccacccccgcccggatcggctcgggcaactcgccccaccgttccaggccagcccgaaccggctccggcagcgattgccaccgttcgatgagtgccgtcaagtcggggccagaaacacggtcggccgcgtttactgcccccgtttctgcccccatgtcactttcgacattctgtaagacgttagggtctttacacttatgactcgaaggcggctgattctcagtccgagaacgggggttcgactccccctgggggtgttgtgtaatttcgtaccgtatcgcaaggcgatgcacccgcaagcacaagcccttggtcttcaagggcttgttgcgtttcttgcgaagtccggatccgtcacctgcaagcagtgggcagtcttcaggaccgggtagccaccgaggaaggcccgcgagtgcgggggacttgattgtacctttgtgtcgggtatattggcgggcgcacgtggggttctttggcaattgaatacgtgaatactcaagagcgcggctgaaaagagccacggccggcgatcagcacccggggatcggacagtccccggccctgcccggcagtcacggtgaaggctgccgaaatgacgccggcccatgtggtgagtccgacttttttccactggggtaaaactctcctcgttttgccctggcattctaagacgaggggtcgcggcgtgcgatccgaggttcggggagggtagtcaccttgagttgttcttggccgatgcaagcgcggccggcgtgaagtcgcacgtccagcagcagtttcagtcaccttgagttgttcttggccgatgcaaccccggcaatgccgtcatagcaacggcctccgtgcagtttcagtcaccttgagttcttcttggccgatgcaacctagaacctgtttcccaagatcaaggagcaaagtttcagtcaccttgagttgttcttggccggtgcaacaacgcccgtggtgtcacttctcggcccgcttctggtttcagtcaccttgagttgttcttggccgatccaacaacatccccgcaatagcgcgggccgttcccctcggtttcagtcaccttgagttcttcttggccggtgcaaccaggtgcatccccttgcgggccgatacgctggatggtttcagtcaccttgagttcttcttggccggtgcaacacgtatgagctatctctttcacagcagtaggtgggtttcagtcaccttgagttcttcttggccggtgcaacggcaccacccctaagctgttgacaacatgggggttggcggcccgttttcgcggacctcccgctcagagcggccaagcggcgtttggttgtcgagaactccacgtgcaattgattttcagaacaggctttagggcaatcgcgaacctccccgggtttcccaggtcgcttgcggtccgcgggaagggcggcagcgtatgccctgtaccttggccatcgatttcggctcggcgaagatcgggatcgcgctggtggagcacaccgaggcagtgcccaaccggccgctctacgcggccaccttggtggtcaaccccagagggctcagcgaggccgtcgggatgcgcgtccaggcccgccgcatccggcggacgcgaaagacccaccgccgccggctggaccggctggcccaggccctccagggcgttgccggcgcggaggagatcgtccgcttctgccgccgccggggatatggtcacgaacctgaggagtcggatgcccagacccgagcgctccaggtgtcgcgggaggcgttctttgccgcgcttcgtgtggagatcgatcgggtgatcgccccggccgatcgcgcccgggtgcttcagatttgctcaagacatctcaacgcggcccggcgccgggacgcggaactccgcccggcgcgattcgagaaccgcgggccgacgaagtgccaatgggaaggctgtcggcgcaacgttccgcgggccggtaatgacttccaggggcgattgcagcaggcccttttcgagtggctcaggcccgtctttgaccagtctcctgaccccgcccggctccgccagtcggtcgatcattgggtcggtgagctggacgccctcggccgggcctaccggaagaccgaaaagctcgacgaagaggccggcaagaagaaacgccgagaactcgacaagcggcgcaagcgcgtctacgcaaacctcaagaagcgggtccgcgaagaggcgcccgaggagacggccgacgactttgaagagaactggcagaccacctacagccgaaacttgagggacatcctcaagggcagccaagggggtcgggtgagctactgccgggagcactcgcggacgttcgtcgattacttcctggccggcaaagtgccgccccaccggatggaagtcaccgagggggacttgatcagccggaagcagcagatcatctttgcgcggctctggcggcttgtggaagggcggctgctgggcatcgcgggtgggcggatcgaccgggtgatcgtcgagcgggtggcgttcgacatcctggccggcaaggccaaggcccgccgcgaattctctgagtccagcgccgccgaaatgtactggcacggaccgcagtacggattctccgaccgccgcgaaatgctggagaaggaattcgacggccgctgcgcctattgcggccggcaggacgggctggaggaggtcgagcacctcttgccgcagagccggtttccgttcgattcgtatttcaacgtcctcccggcgtgccgggcgtgcaacacgaagacggggggcgcgcacggcctcggaagccgggatgacgatcgccccggaagcctacgaagcatacgccgcgtatgtgggcaagctgagagtgccccacctcttccacacgatcaagaaggggctcttgaagctgctctcgcgggatgggcactcgacggaggtcgagaagcggctgggaatgctggcggacaacctggtcacagccaccgcgtcgcagaaatctccccgaccgctggcccgctacttggcgagcaagctggagcgccagacgggatgccggccgcaaatc

SEQ ID NO: 106 - DNA, 6796 bp, Artificial Sequence
  Synthetic
ctttagtaagatttaggtcacctaatttgttcggaagataattgtaattattaccagtgctgcaatttatgaagatgagaagggctatcaaaattaatgcgaaaatgtttttattcacttttttgaacatattgcctttttgatatttcatctgtttgaatagtctctgaaaaatttgatggccaagctctgtcataaattttcatcaatcggcttaatgcagtttggatcattgtttttaacagagtttacaaattttgatactggataatatttcatatcatggattaagccatcttgaaggataatttctaattcttttgggtcttggatatcgggattcaaccatttttcatggaactctggatcaaggattgctggcatacggtgatgaatactgctgatggatccactggcttcgcttgttataatcgtacaggacttataaacagattcttcatcacttcctttatcaatccatgtttcccacaaaccagcaaacgcaaaggattcaccggaaggaatggaaacatagtatggttgcttgtgtcctttttcacctttccattcataaaatccatctgcaggtattaagcatctacgttttctgaaggcatttctgaaactcggtttctctgcaacagtctcagcccgggcattgatcattctggaggcgatggaaatatcctttgcccagaacggcaccagaccccaatgaagcttttcaagtctgtttttgttgttatgttttataatcgaaagaatctggtgggtgggcgctacattgtagtttgggataacttcaaacaataccgtgccgatattgaatatctgctgaatagtttgcaaaggactgtattgaacaaatcttccacacataggcttcgctttttaaataaagttactgatggatatttttaatcggagttcaaccgatccctcaacttaccagaacacctaaacgtaacaacttttcttggttcaagcatcaggtcatccccagtagccggattcctgcctttccgttcccttttttcctttacacagaacctgccgaaattggagatcaacacatcctcaccggatgccagtgtgctcttgatgatctctaagagggtttctacaatgtctgtggatttgttcttgggtaaaccgagatggttctggatcaattctacgatctgaatctttgtaagtgccatggtggggctcctcatgtattaggttggaattataagtcatttatctgaattatgagaagggatgtcaaatgcaaagccttaactactactatgtagtatctttagtagccacttgacattttgggaagattatgagaaagaaaggatcgagaaagatatctattatcaacaggttaacttataagccctattctggtctctttcctgatatctcacttgcctttacctgctgttaattcaactttggcttgccttggtacgttgccaatttgatcctctttatcctgaaacatagggagaacatatgtgactattttgaaccccatttctcagatagagaggtggggttttgtcgtttttcaagaatagaataacttgatatgcaacagactactttatcaatagactttggttcaaaaaacatcggccttgcactggtgcggaatgagggtgataaaaacatacctctattcggaggaactttgagttatgatccagtgcagcttaagaaaaaacttaatccacgacctttactccgcagaatgcgtagaacaagaaaggcccgaaagacacgacttcgcaaactgggacaggggcttaaatctataggtttggatgaaaagttgataatacagttagtgtcctactgtaagcgaagaggatggatttcgctcttcggcaacaacgaaacagacgtgtacagaaccaaggatgatggagaaatactttttgggttttcccgtgaagagttcttcaaagcactggaaaaagagctattagaaaaagtaccatcagaaaaatataaaaatgccctcagtgtctgtgagaacgtattgaacagatacggagatccacataaagaggttcgtctcatccgtattgataatcgtggggtatcacgttgtgcatgggagggttgtgacagagtcacgcccagacgtgataatgctataaaagatgctttatcccagttcgtatacgtaatcatagaccgagatcgccttcttaaggaagacggtcttaaacaacagcttacggacactttggatcgactggaggaaattggaaagcgacttcggaacgctggaggtagaaatccattaaaaagagatccccaacaggtcaaagcagaacgtaagattcttttgaagaggaggaataaagaacttagactgattaaagaacttagcaatgatgatacatggtcaaccaatagaacaaacatcattaacatccttgaaaaaagcagaggacgcaaccgttactgccggaaacacagcgcagagtttcttagatactggatcgaaggtaaggcagttccattcaacagatcacttactgagaaagatattatgtctcggagagaggaggtgctttttcagaaactgtggaggtacatcgaagcaagacttttgcctttaacgccaaatggcattgatcgattggttgtcgaacgggtcgctttcgatctcttggcaggtacatggaaacaacggcagaagattggtgataaagcacttgaagagatgtaccaacatggccctcagtacgggtttaaaagcgtactggatatgctaaaggaagagtttggtggactttgtgcctactgtggcataaaaaccgatagcatccttgaactggatcacatgcttccaaaaagagatttcatatttgacagttatttgaacttggttcctgcatgtcctacgtgtaaccgtcaaatcaaatcgaaacactccccgagatcagcgagacttaccataagcgaaaaagcctttaaggcttatcaggagtatctccaaagtaagtttaaaaacaaagcacctcaccacctccacaatattaagaagggtattttaaagttaatgactgatccggaaagatcgtgggaagcggaacagtatcttgccctaattgccaaaaactatcttgaaattaccggaacccagagaagtccccgaccacttgcccgatatcttagccaaaagctatgtagcaaatacggtgcatttccaaaggttgttttcaataatggacgccacactgccctttggcgaaatgcggcctacccggagttcgataaggttaaagataaaatttcaggcagtgcgattaatcacgctatagatgcgatagtgttagcgtcaaagctaccaagccccacactacttgaggggctaaatcttccagttaaatccttgaaatcatggactaacaaagtgcaaaagactgctccaccctctggatcagaagggatacctgtcatgcctgagccaacttttgcagtaccgggctttgaacatatccttccgggtaactatgtccaaacacatctatcgtttctaaactggaacagaaaagacacaagggttcagcgacaagacatttatggctggaacagatatcaagatatgcctacaaggcgaaccgctgcttcagatctggtagaaaagtttttaaaagctgacaaggaacacactgaagatactaaattaaagaaaatttccagagaagtgaataacattattcatccacacctaaagaatgtccttagatctgaaatgattaaagactctcccggagaagcatgtgcacgtgcactgaccggttggctcagaaaatcaataaaaggttctcttccgaaatcacacttctcaaatcatcctgcagatcagagcagaaagaagttactcaatgattttatcgaaggcaacattgatacaatacctgtcacaataggaataaaaatgttacgtccacacgataaaggtgctgtagatcttgagcgagttggaacgaaaaacggacacatcattcatcgttatcgaagcgatcctgctatcattgccaagatcgtttgctacaaggggaaggatgaacaaatagatcgtaacaaacccatagtctatgactggcgtcaaagctggaagctggttggaaagagtagcagggttcctgaaacaccagaagggctattaaaggggcgtgcgtttgggcagtctcttcccaaagagaaagattggttttcagcgttagataagtaccttggggaagttggtttttcagattacgcagtagttagacaaggatgtgttgctgtgtatgaagacggctctcagctatacattcgcaacttttcatctactcaaggattcaagcaaagcatgttaaaaggtattgtcggtatacgaagctcaccctttgttgacaagaccgtgatgaacagggtaataagataagtaggtagcgtaactgttctttgacaacggaatagtagtgaaggttggaaagagcatctgaccgagaggtgcactccgggttattggcagatccggctcttgctgcgtccttgggccattggcctctggacgaaccctttcggcatgttttcggacaagatgtgagcctttttactcagcatcacctatcgacttgcaatgtcgatgtaactcattacaagacttattgaccgggagtacaaccgggttccaatcacctatcgacttgcaatgtcgatgtaactgataaattaacaggttcaagcatcggctcaacggttccaatcacctatcgacttgcaaggtcgatgtgaccccttttccaaaaccacatagtctgttaattcctgttccaatcacctatcgacttgcaaggtcgatgtgacactttagaggtgtttaccggagcaccataatcatgttccaatcacctatcgacttgcaaggtcgatgtgactgctattccgtttttactttttttatcggttggttatttgagtgtttttgcgaaccccaagtttattaacggtaacctcaacattgtaagatttcaattagaaaacatctaactttttcatctggttactgatttgcgaacccaccgggaatttgctgcccactcgtggttcgcatgagaaatggttccctgtttaaaaatgacttgatatttaccaaatagaagaccaaacccatgaaagacttattaaccaaaatcgtacaagcagtggtcgacaacccggaacaggtacagattaatgaaattgaaggtagccagacaactgtattagaactcagagtagctaaggaggatataggaaggatcattgggaaacagggcagaatggccaatgctatccgggttttattaaatgcagcttctggaaaggctggaaaaagatacatggttgagattgttgaatgatgttgagggttaaggagtattttgataactttcaaaaaatagtggatgaaataaatcatggataaagcacacaccacaaaatacaataccaatcttgcagcagagttccatgtcctttcgattttgcaccggcttggacttgaggccacactcacacttggaaacaaaaaggccgtggatatattcatcttcaaaccggacggaaagactctaaccatcgatgttaagggtgttgcaaaaaagtctgactggcctgccgataacctgaaggttgatggcaagagaggccactatatcattctggtgtgctttaatgcaaagattgcagaacctaatgagcctccctctgtttgggttgttccagccagagaaattaagaagttcaaaaagaagtacaaaacaaggacggttgtttctcgtaaaaagatagttcacgaaggtgaggaatatcttcaggcttggaattctttaggttaggccagcaggtggattccacagtaccggcaggacagatatgaggtgtaaggggtgctcacatgaaagattttctaatccaaatcatacaagcactggtcgacaacccggaagaggtacaggttaatgcaattgaaggtcgccaaactgttgtacttgaactcagagtggccaaggaggatatggggaaggtcattgggaaacagggcaaaacagccaatgccttccgggttttattaaatgcagcttctggaaaggctggaaaaaggtacatgcttgagattgttgagtgatgtggtgggaatgaattgagacaggatagtttggatttgacgatggtcattatacaatatctgtattaagatcgatatttagatactggcaagatgaaatttgaaggcatcacattaaaaaaaaccaatttatcaaatcaataaaaggggggtaaatggcaactgcaagaataatatttaatagatgtattcaagattctcaagagtatggaagtgatgatgaacatatgatttcgagagtgtttttcactcttgaaattggtgatagaagaattgatttacatgccgacataaagcaggctgttggtagtagttatgaaaaaggcctaatcgaggttggcatgcctgaaggacatcggggacccttcaattatgaagtttttcgggatgctgcagaaagatattatcggagtttagttggttctggagctggtgcaataaatattcaaggtggaaccaatattcgaatgcaaaataatacatttagcaaagtaatgactgtcgaatgtgaaatagacgaaacttcaggaggttggtagattatttacaagacaaaataaaacataacaaaaaagtgctcttgaattcgtgattcttcccttgcttcccctatatgcatccccatct

SEQ ID NO: 107 - DNA, 3340 bp, Artificial Sequence
  Synthetic
ataacaccaaattgaacgaggttcaatagaaaaaacggtgctacgtaccaatctttttttctaccgcgcagcggtttagttcttcaaacaggaatgaacggcagaggcgagccgcaacttttctatcctgcctgtctccggtcaagcgacttttcttaagcaaactcacaccttttcaagtcttcagatttcccttgactttcctcgccaacttgatagactactctcaccaaccttgagttagtatcgctgagttagcgtttccaagttaacctgacaacctaaccctcaaccttttgaagagtgtcagctcttatcgtttggatcgaacaaagtggctcccacggatgaacctattgtgaaatccatgatcacgctatccattgatttcggttccaagaacattggcgttgccctggcaagaaaccaggaaggaattaacactcctttgttcgccggaactctcctatacgacccctttcagctcagcacaaaggtgggacccagggcgcaattacgcagaggacgccgcactagaaagacaaagagataccgcctaaatcgtttggaaaagaagctatctgcaataaaccttcctgacgaaacagttcggcaacttatcaccttttgcagacgccgaggatactcttctctttttgatgaacctcacaaattagacctcgaaaaaaaggagccgggagaggagatcgtttttcgtttcagccgagaggaattctttggagtattggaaaaacagatcgataaattcgtacccgaggataaaggggcaacggttctcactttatgcgaagatatcctcaaccgcgctggcgatccttccaaggaaatccgtccattaaggatcgacaaccgaggagcctcccggtgcgcctgggacggctgtgataatgtccctcctcggagggataacgccctccgggaccccctttcccaattcgttcatacggtatttgcttcaagtctcaggggcgacacagccctccagcaagaggtctcaggaatgttggaccgcatcgcgatattgggaaaacggctccgccatcgcggaggtccagacccagataaggagcgtaaggcccttaagtcagaaatcagcgatgaactgaaactgttgaagaagctgtatggcctaaaccctgatttgaccgaagagacggctactccctggacaaagattcggcagaacataacgaacctgatagaacagaccggagggcgtaaccggttttgtcgccaccacagttctcaatatgtcgcccacttcatggaaggaaaaccgataccttttaaggcaaccttgaccgaaagggatttagtgtctcgccgtgaagaaatcctttttcaaaagatttggcgctatattgaggcgagaattcttccgcttgctcccgatggcattgaccgtgtgattgtggagcgaacagccattgaccttctggcaggtagccgcaaacagcgtcaagggattatgaataaagaagcccttgaggagatgtatcagcatgggcctcgatacggatttgagaacgaccttgaaatgctgagagctgaattcgacggtctgtgtgcgtattgtggcaagccaaatgccgaattggttgaaagagaccaccttctgccccggtccaaattcttcttcgacagctacctgaatatagttcctgcttgcccaccctgcaatcgaaccttgaaacaaaccgcttcgccgggagaggcagcactaaggattcatggacaggcatacgatgcgtattcaaaatacatggctttgaaatttagagataaaccacctcatctgtttcataccatcaagaaaggcatcctcaatctcatgcgggagcctgaccgcgtctgggaggcagagcggtatcttaacatcatcgccaaccagtttgctcaggtcacaggaacgcagcgggggccacgtcctttggcccgttatctcagcggaaagatattccagagatacggtgagaaaccccgcatcggttttgtcaacggaagacataccgccctgtggcggaaggctgcttatccggacttcgacaaattcagggacaaagccgaaggtggagtcatcaaccatgcccttgatgctctgcttatggcctgtgaccttccggatttgaccgcgctggaggcaaggaacttacagccggggttgatgcaatggtgggtggacaaagtcaagaaggcagccccgcctcaaggtcgggaaggagtccctgagctgcttgaacctaattttgctgtgcctggatttgagaacgttctacctgggaattatgttgaagccgatttggcgaagatgaactggaaccacaaggattctcaagttcaacgccaaggcgcctacggttggtcaaaactgcgcgatttacccgttcagcgtgtcacagccgcaagtctgacggatgagatcctccaagccgacaggaagacaactcctgagtcccgcaagtctgaggtcaagaagaaggtggatttggtcgtccatccaagactccgcaaagcgcttgaagaagcgaacaatggcgataccccgggagcaatcacagccgaggtgctcaaaacctggttgaggaaatcaatcaagggaaatcttgataaagcccatttttcctctcacccggcagaccagcgcagagcaaaaatgctccaagattttctcagcgggcaatctgaaggcatccctgcggtcataggagtcaatacttttgtgccctcgttaaagtccaatacggatttgaatcgaattaaccctgcgaccggtcatgttatacaccgatatgttgccgaccccgcaaatgtggcctacatagtggcctaccagaagaagaacggtaaggtcaaacgggataagccattgacccttgagtggcgccagagcggagccgtcatctctgacagtcgtctgtttaaagaagttcgtgaaaagccattgatgggacgtgcgctcggagagagagcgaccgaccagaccgcttggaaaactgctttacgccactatttaaccagcgcaggaatagctgaatacaatttcgtttctcagggaaatgtggttgtttatgaagatgggagtgaacgatacgtcagaaacttttcgggcagttatgggttcagaaagtcttggtttaaggggatgacagcagttcgaccttcaccgctgaccaagcgtttgattccaaatgcaacactttagaaggtcttgattccgttctttgacaactggatagcgttttcaggttcaagctgaaaagagcatctgtccggaagggccactccgggttagggcagatccggcacttgggcctccttg

SEQ ID NO: 108 - DNA, 7646 bp, Artificial Sequence
  Synthetic
cgcctcgacgacgcgttatacaaatcgcgagtcgagcaggaaaaagccggattaagtcgtgctgaagccgagttggcgctggcgaaggtcaaatatgaacgggcgcagacacaggaaaaggtagggttgcctaatgcggatcaagtccccaaggcagtcgtggatgcggccgaagcggccgtggaacaaagtaaggccgcgctggaacaagctcaaatcagtctcaaccacactgtcatcaagtcgctggtcaacggggttatcgtagatcgccgggtgaacgtgggccaaaatgttgcaccaactcccaatgcgcccaccctgtttctgatcgccaaaaacatgaaaaatatgtatatcttggcctcggtcgacgaggccgacatcgggcggattcgcgatggaatggcggccagtttcaccgtcgatgcctttcccaacgaaaccttcataggcaaggtgattcaaattcgcaaagatgcccaaagaactcaaaatgccgtgtcatataccgtggtattaagcttcgacaactccaacctaaaactcatgccttatctgacggcgaatctaaagttccaggtcgaaacccgccgcgatatactcctcgtgcccaacgccgccctgcgctggaaaccccggacggaaatggttgccccagacgctcgtgagtcggatcaaactgctaaagataaagataattattgccgcctctgggtgaaagaccctgacgggcagcatgttcggcaaattgatgttcaaaccggcctgaccgatggcacgatgaccgaaatcagcagcccggacgtaaaggaagggatggaagtggtgatcggcgtggcgctgaagggcggcaccggacatggcccaaccattaatccctcctaccgcccggagggcttcaaacagccggcaacgcagcagtaaccggcaatcactgcgaatcctgccggcgccccgaccgactaatgagagtaagcggctctccacgtattgctcccctatccgggcaccgacgggcaccatcgggcaccgacggggcaccatcgggcaccgacggggcaccatgcggagcatggtcgcgttggtcggcatggtcgcgttggtcggcatggtcgcgttggtcggcatagtcggttggtcgcgggagaggggccgggggtgagtgcccattgccttccaaactccaaacttattcttaaacagccgctaagtcccggcatcattatatcttacaaaaaaggggtggctgaggggacttgaacccccgacttccagatccacaatctggcactctaaccaactgagctacagccaccatgtcccaatcatatagacgctattatatatgaattgttcattgagtcgtcaacacatacaccggcattgggctttaagatggataagattttcctgaaaaaaggcaattatcggccggaaatgaggggcgaggggataggggcgaggggctagggaaggatgatcatatagaagtaaagagggaaaagatcagattgtaccccgaacatcttaatggcattcaagggcatagcttggggttgacatttgtgttggaaagtctatctttagggatacatacatacagactgctctttgacaatacgaacattaggtggtgactgaaaagagccacagccggcagccagcacccgggaatgggacagttcccggccctgcaaggcagcacagagaagcgtgccgaaatggcgccggcttatgtggtgagtccatttatttttattgataaaggcacacagccaacctgatttttcttctccgttgcgattaatgaccggactcttgagtaactggtcgagtgagtttcagccaaccagatttttcctctccgttgcgattgcccgcaaccgatgtcgtcagcggtgtcttgatgtttcagccaacctgatttttcctctccgttgcgatttgacgttcgcaagttccaacgtataatccgttgtgtttcagccaacctgatttttcctctccgttgcgatttgcgctgaacagactgatttggattgccttaaacgtttcagccaacctgatttttcctctccgttgcgataccagcgtgctggtcgctgtttgttccagggtcatgtttcagccaacctgatttttcctctccgttgcgatccggcggcccttgtatcaacgtgccgactactatggttgtttcagccaacctgatttttcctctccgttgcgatgcgtactggcgtgagaagtggcatacagcggccgtgtttcagccaacctgatttttcctctccgttgcgatggcacccctcgttaatccttactagcgactaggttacgagttggttttcgcgaacctagccattcaatcgtagaggaaatgttcgcattcaaagggccttatgcacaaattgttcgaagatgtatagttacgacaaacgcgaacctaccgggctttctgcaaccactggtggttcgcgaaaaggtttccgtgacatgtcttgtactctggcaatcgactttggctcaaagaacatcggcatcgctttggttgagcatactgagagcgtgcccaatcgcgttctatacgcgggaacgatggtggttgctgctaaaccactcaatgcagccgtgcaaccccgagcactgtcgcgaaggatgcggcgatcaaggaagacccatgtcgggcgtttacgccggttaagccaggcgcttgccggcaccgaaggcgcacaggaaatcgttcgattttgccgccgacgaggttacagccacgaaccggaggattcggatgaaagcgcccggggaatgcatttttcacgtgaagatttctttgatgtattacggcaagagatcaatcgcgttattactccagaagaacgtgacagaacgttgcgggtctgctcgaaacatctcaacgaagcacgaatacagacaagggaattgcgacctgcccgatttgataaccgaggacctacaaagtgccaatggataggctgtcgaaagagcgtgcctaaggctgccaatgcgatcaaagagcggattcaacaagctctatatgcttggatgaaaccagtcttcgatgaatgcagtaatccccaaggacttcgccattcagtcgatcattggattctagaacttgatggactggcccgctggtatgccaaaagccagaaattaaatgatcaagcccgcaaggaaacacaaaaactcattaacaagcggaagaacctgatatataagcacataaagtcgcgagtatgtcaggaagtatccgaagaattggccgaaaagtttcgtgagaactggactgagacatacgggagcaatattacagaaatcattaccggtggacagggcgggcggattcgctactgccgagaacactcgaatagcttcgttgatttctttctcgcgggaaagcagattcccaatcgaacagatataaccatggccgacctgtttggccgcaagcagcaaatcctgttctcgcgaatctggagactgttggaagagcggttgctgcccttggccggcgggcagattgatcgagttgtcgtggaacgggtggccttcagcatacttgccggaaaggctaaggatcggcgggaactttccaaggacaaagcctcggaaatgtacaggtatggtccacaatacggtttcagcgatcgccgagaaatgttcaaggaggaattcggcggccggtgcgcttactgcggtcaaactaatgcgataaatgaggtggaacaccttttgtcgcgaaacgagttcccttttgactcttatctgaatattctgcctgcttgcagcgcctgcaatgccagaaaaggcgcacgtacggcatttgccgctgggatgacgataaatcgtgatgcttatcaagcatacgccgattacgttggtcggaaaaagccaccacacttgtttcacacaatcaagaaagggatgctcaatcttctttccaagaatggcaactccttggaagtcgagaaacagttggggatgctggcagataacctggtgacgataagcgctactcagaaagggccgcgaccactggcaagatatcttgcaggccaacttagcaaggtgaacggatacccctgcgagagcttatggatttctggccgccatacagccctttaccgcaagattcttctgcctgaatatgaaaagcaagatagaaaggcggcacatgatttgatcaatcatgcggtggacgcaataatcctgggctgcaaactgccttctgcggctgcaattgagaatccccgttggtatgcccgtgcacgcgatatcaatgattggcgtgataaggttcgagccgccgggccggcgctggaaaatggcataccccgggtagaaccggttacattcataccgttttttgagggagaaataggtaacggctactgttccatcgatctgagcgcattcagttggaatcgaaaacaccaatccgggcacctgcttgatcccgtcgggatgacagatggcaaattgccaatcaagagagaaccggcaacggaggtgtttgcaaatctgaaagaccaaaggaaacgcgatgagcaaattaaacgtatagcccatcccgccctaaaaaaactgctggaatcgaatccaaaaggagcagcggaacaactcatacgctggttacagcaatcggttcaaagcggcctttcgagtggaaaaatggggaaccatccttccgaccaggcgagaaagagacttctggaggagttcgttaacagccctgttgagattttcttgaaagatgataaggatgggcgcaaagacattccacaaataatcggtatccgttgtcttattgccggatcgtcattttcgatgttcgatgttactcgatgtgatatgacaggcagaatttttcagcactataaaactgatccacacttgaaagccctttatgtgggataccgaaaaaacaagaagggtgtgcttgatctctcacggccggtcctattctgcgttaaccagatttacgcagtaaccaaaagggaaagtagtggggtacaagtcctagatatcaccgcagatagcccgcttcgtggtcgtgccttgggctccaaaggaagcttgaaagagtttttaggcagatggcaagtggctttcgatgaactttgtcgttctgagtatattatcaagcgattccgaatcactcagggatgtgtcattgaaaaaagagacggaacattttttcaattgcggaacttcgcccgtgacaaaccttggatgaaaggttctccgtttagaaatatccgccgagtgtatcgttctcctttcctgtttttaaagcaggcccaaaatatagtattagaagaacatcattctaccctgataccgattgatcaagtaattgagtaagtaggataccgtccaccgcccactgaccaccgcccactttatttctccgtgttcttcgtgccctccgtggtgaatacaaatctaatcttgtgccacctctaggcatagcctggcgaacaattgccctttttcatgaaaaatcacttcagccaaaaatcaggaaaaatacccaaaaataccaaaaatagttgaatatgaatttcctcacgtgtaacttttttctagtgtgtttgcccccatcgctcttcgcatctcctatttacacaacaacttgcttccagccccccagatggtttttctgaaaactcaaattctgacttttcagaaataattcatttccaaaaaactcttgtggaaaaattccaactgcttatcccgcaatacatttgcgcgcactgcaaccacagtcttttcactgatattttttaagcactaaaatgcctaaaaaaacggcaccataaccccttattttccaaccccttaatatctgtcctcttgaagaaaaatgccttttctccgtacacgcggaaaaactccaaaccccttcacgaaaaaactcccctttcttttacatcatagtctgaaacccggggtagccgctggcgcggcaaccccgggctatcctatgaaagcccttcgggctatcgaatgcgtgcggtttgaaattggaatccgtagaatggatctgtcttatcataagtccttcgggctagcccgcatttctcacagtgggtgggccggaggtcgcgcaagtactttacttgatgcgcggtgaaagcgcgcaaatatcaaacaaaaaatttattcatgtgcgaccacgatcatcgaatagagtcttgtggcaggcacgatgaaggacaccgattcgcccgattcctgaaaactcagcggggccggatcatccgcgtccggggaaaaacaggttacggattttacccggccgggaaattgcctgcgcagggcgacagggaaaggggcgagtttatttttgcggtcgaagttgatgaaatgagccatggtttcgcgcgtcgcgggccgattcaagagttccataaccgtggtcaatggggcctcggtagtgatggaagtgccttttggcagggcctcgactacggcatgaaagatttcccggtggtttttgggcagcacccactgggcgggcgacatgcgctggctcttcgacgggccggcgcccggctcggggtcctgatcgtcgaccggcattcttgaagagcgcgcgtcggcgcggacaatttccgggatgtatatgatgcggcccttgccttcgctccgctctggtagcaaggggtttgtgcgtcgccgttcccgccactggttatattgcgcggtgttgccggtcagaaccagggcgccgccgccgcggacatattgcagcagggttttgatctgggtgtcggaaacgcattcctgtccggccaggatcaccgcgccgtagcggccgatgcggtcgagttgctcctcgaacagcaagtcgaaggggattttgtactggattagcacctgctccattaaagtagcgggaaagtacgcggagttgatgctgtaggccatggaaggccaattccgcagcacggcaacgtcggccacgttgtcggttccggtgtagtagcgatcgttgtactgtcgaaagaactccatgatgggtgtgaagacgttgtgcgcccctgcgccgaacggtgcgcccgggtatccggcaacgggcttctggtagccaaatgccatgtggaccgcggcacgaagttcgtcgtgcatcgaatcttcgcaactagttcccagtcgccgggccattttgtaagagcggatctgggaaaccaaggcgccggtagccgggtctatgcgggcatcgtagccgccggtatcgaaagacaacacgtcgacgtgattggcgaacagcgggtggtagacggcattggtccagtatcgattgaagctgtaaaggcccttgatgttcagatgcaccaccacgttgggattaaggccctttacatagtcgtgcagatcattcgtataatttgccagcgactcgcagcggaatcggacccactcctggagcaccgggtcgtttagcgcggtcaggccatcgggctgtgtgggcgagtcccactcgctgacccggatccaatccacttccggcaatccgaagcggcgcattaccgactctttggtcgggtatcgctgcctgaggaaatcgtggaaggcctgtatgcatcgcgggcagcggcaggactttggct

SEQ ID NO: 109 - DNA, 17641 bp, Artificial Sequence
  Synthetic
atatcctgacggaagccgtctcgtaacctgccaactttctattttcgccggttctttggcagcttgtaagttgaaattgatctggtgcccgcccggacgattcatgatgggcagcgcggcagccgaagagggccgtgacatcgacgaagagcaggtcgccgtgggattgtcggacggcttctggcttgggaaatttgaagtcacgcaaagcgaatggaaacacgtcatgaatacggagccctggaaaggccagcccctcgtgaaggagggcgacgactatccggccacccacgtgagtcgcgatgaggccctcaatttttgccgggtcttgaccacgcaggaacgaaaagccgggcgcatgccggcgggattcgagtacacgctgccgaccgaagcccaatgggagtatgtgtgccgtgcgggaacggcaacgaggttttcctttgccgacgatacgctgacattgagcgatcatgcgtggtgggggggcacaggaccgtgggggaatacccaggacgaagcctatccccatcgcgtcggtctgaaacggccaaacccgtggggactctttgacatgcacggcaatgtctgggaatggtgccgcgacgcgtacgtcagaaaactgccaggcggccacgaccccgaggtcgcagtagcgaccaaagaggacaggctcgccccctggcggcggtgcggcgggaattgcattggcacggcgaatttcgttctgcgcggtgggagttggaatcgcgcagaccactactgccggtcagcgttccgatatcgatttccacgccgcgcaacgctttcggaactgggctttcgcctggccctcagcgaggtcccgtaaagctcggatgcgcgttgtcaccgtgtttggcattcaacctcccatccgccggcgatagaatcaatgtgtgtccgccccggcaggtcgtacaagccccgagcactggcaattcccgattcggatgcccaaacggcggtggatattcctgagggtgtcgctggtcatcggagtggtcttctattttgcagggcaggatctgagtcgcattgagactggcgagaaagttcctcgcgtctcctggctcccgccggctgccacgaacgtctcgtactaccgttcgtacttgttcacggcgtatgaattcgacgtttcggagagcgagtttcttaaatgggcacagggatatgacctcaagcccgtccgagaaccgttctcgatcccacggtataacttcgcggccaaagcgctgcctcctgaggacgccagtgaggaggatgccaggcgcatctgggagcgggcgtcagttcgaacggccaccgtcaacgatggttatttctacgagcaggaacgtggacgaagcggcggcttcacgcgcattgcctgggatcggacgaccagccgcgcgtatttccagtcaaacccgcgatagccccttcggactcaccatgactgaatgatcggaagtcactgtgccgccccccgagacgcgcccggcgttgatccgattcgatctcggcggaagggctgagatggcgacggaagtggaattatggcgcgtagtagaccgcgacatggccgccattttctgtcggcacgaaaaggaagtgccatccattattggccggcaagctggaagaagtaggcgatttccgggcgaacttcgaaccaggacgattgtgggcctgcgaaccttgagtttgcccagcccacgcaaaggacgggccattaatggatcgcaccatcccgttatgattgacgtcggcctggcaatcgtcgcgacctggccgccgcgaccgtcgatcgagctggagatcatagcattcgcaacggcgacgacagacgggcccgccgagccgccggccagtaatccgccggttgtcgccgtggccgaggaaccgagcggcgaacagtcaacggccgacgatgacgcaaccgagccaccgcccgcggccgataacgacaaagcccacggtgaccggcgacgattcaacgggagggcagcggcggcacctaacccgacgaaagcggaaatcgccgaggcctgtttggaaattcaattcggctggagcgtatttgaagaagcatcccgccgcggcgttgacctgaaaaaaacgagctggcgagtgcaggcggtgcggtgcgaagcggtaattgaaggcgacgcgggggagtgattgccgattgttctatgacttgaaaaaaaatcccggaagatcaataccagatcgacttgcaataaatttgatagtggcagtgtcctcatcggtcggtgtgcgaggaagtataatatagaatttcgggtggccgcctacactcttttcgatgaaaccagcgtttggaaacgcagcttcgatagaacgaacgaaagtatcacgagccgtctcatcgccggcaaatccaaattcgaatctttcatttggaaaatcgcgacctcggattatcggttggcttatagaaactcggctttcaattctgtcgagacgttcaagaatgtatttcgaaatgtcatcttgacccgtaacttctcgcatgacctgcgatttcgcggcacggtaaaccggattatccggttctgttccgtccatcgccgcggcgactgaacttttcaaatgcttcgcgatttcctgaacgccggcgatgtcattcgtgtagaaaaacgttcgctcttgcgccaggtcgaacggcaatcgcgtcccgacctcggccagcgacacgacaggaagtcgcttgcagtgtctaaccgccaattcgtacatcacgttcgggttgagatgcgtcaggtttgctacgacaagatctgcggaaagcaatttctcgattacctgaatattgatcgagccggggtcagagattcgatgcgccacttcgaccgcgaaacccagctcccgcaagacgggttcaatcaccacgtcgataattccgtccgtagcgcggcgtaccgggctcgcatcatcgccgatcggagtgatgacgaaacaggttttccttttagtagccggctcgggagtcgcggcggccggcgacggcgcgggatcgtcaggcatggtcactctggcctattgtgtttcactggcggctaatggcggctcgtcgggatatgaaccgccaaacgcatcttttgaatacattcgaatgagaagcggttctaggatgttttcttttggaaccgttttcaagagcgcgaattcttcaatcagtggcttaaatttctggattccccattttgacaggcagttgtagagaatcaacacaagttcatcgcttgaaagctgcgctctaaccagattgacgtagaactttttgtcgtcgatctcttcggctctcttgacgaatttaatgatgttgtagagaagccgaaagtagtgaccgagggtatgttgccgcgaaatatagaatgtttcatatcgccgcaagaaatcaattggacggccttcgattgctgcttcctgtctcacttcaatgtggaatttatgcacccatgcagcgaagcatgctcgacctttatataaccgcccgtcgagagttagctcgatcgcattgatgatgtcgttatgcagcttgaggagttgaaaaaaagacgactcgaaactctgcgtgtagttaagcctactttgttctgcggctgttttcgatgaatcacttatttctttcgcagtaagtcgcagctcgtggatctgaaatgcgagcgttcccaagaggccaaaggcggtaataagaccgaaaagtggattcaggattcctccgacgtaatctccgaattgaccccaagtcgcgggatcagcagcgagatcatgaaatgttcgataataatcacgtaccacgaaaatgctcgaaacaatcgcgcacagcaagacgatcgcaaaccacatgaaagccgatgtcggaatgcgattcggctcagcactgctgtcgtcaccgtgttgcataatagcatcctcgattctgaagtctcgggtggactcccggcgaccagtctaccgccgttctcagtccctttccaacgaccgcgcccccggtgacaatccgtcgcatgtcgccacgtcagcgaacgattctcgacccggtgaacatgaagcggtgtcccgcaagatccgcttgcgattgaggagcgggaggcgtatgctggctgcacgattgcctgttcttttacaattcgacaaccgacataatcgcgtctgaaaagagcctagacccggacgagcacccgaggatgtggacagtccccggccctgcatgacaggtatagagaagcctgtcgaaatcgtcccggttgtttatggtgagtccattccaattgtctgcaaacagacaccctcaacctccgtcggtcactgcgactagcaatgtcgctcccccacgtcccgcttgtcggaggtttcagacacccttaacttccgtcggtcattgcgaccctcgttctccagttccttcaaaacacccctgagtttcagacacccttaacttccgtcggacattgcgacattccaccgcagccactgagggagagtgagacgatgtttcagacacccttaacttccgtcggacattgcgactcccgccgagctgcaaactgtgagcgagacgagaggtttcagacacccttaacttccgtcggacattgcgactgcctgttcccaagccattggacggctgaagtttgggcggcggtttccgcgaaccggctcgttttccagcgaccatatagttgaggtacaaacgtcggttgtcgaaagttattgcactcgaaacggttgcagctttcgcgaacatcccgcctttgagccatcagttgaggttcgcggtaaatggcgtcccgatcgacaacgctggccatcgactttggcgtgaagtacgtcggcattgcgctggtcgagcataacgagaacgttcataaccgcgttctgtacgcggcgacagtcgttgtcgatccgaagccgctgaggagcctggtcgaaaatcgggctgcaacccggcggcttcgtcgtacacgtaagacgcactcgcgccggttgcgacggttggcgcaggccctggctggggttccaaacgccgaggcgattgtccggttcagccgacggcgcggatacagccacgaagcccccgaagagcaggacgagcagacgttccatgtgccccgcgaacaatttttcgtggcactgaaagacgagatcgaccgccttgtgccggatcaagaccgggagcgcgttttggcaatctgcggcgaacatctgaatcggctccgtcgccgtggtgccgagttgcggcccgcccgattcgacaaccgcggtcgctcgcgctgcaactgggaggggtgccggcacaatgttccccgagcggggaatgatgtgaggggtcggctccagcaatcattattcctgtggcttcaaccggttttcgggcagactgctgatgtaccccgattccgcaaatcactgcaacactggatcgacgaactagctggtctggctaaagcgtatcggcagacggagggcgacgcgcccgagatcaaaggcgcgcgcaagctagtgaacgcccgcatcaagcgagttgccaagaatttacgcgaccgggttcacggcgaagcgcaaaatgatgttgtggagaagtttgacattgactggaaagagtattactggccgcagatcgctgaaatcgtgaggggagaatccggcgggcgagtgagattctgcggcgagcattcgaaaatgttcgtcgattacgtgatggcgggtaaacagatcccgaaccggcaggagatcaacgacggggatctgatttcgcggcagcaacggatcgtgtttcagcgactggcccggctggtcgaggggcggatacttccgctggccggcaaccagattgaccgcgtcgtcgtcgagcgcgttgcgttcgacgtgctgacaggtccgctgaaggcccgccagtcgatgtccgagtcgaaggcggcggaaatctattggtacgggccgcaggcgggcttcgagagtcgcgcccaaatgctggaagccgaattcgcgggaacctgtgcgtattgcggcgagaagaaatcgacaaccgaggttgagcacatcttcaaccgcagcgaattcccgttcgactcgtacttcaacgtcgtccccgcctgccgcgagtgcaactcgcgcaaggggggccggacggcgttgcaggccggcatgacgatccatgaagcagcatacactgcatattgcaattatctgcggtcgattcgagtcctgcacccgtaccacacggtcaaaaaggggatcctgaatttgttgcgccggtcggcaacgtctgaccgggcgcagcagatgatcgggctaatcgccgacaatctggtctcggttacaaacacgcagcggtcaccgcgcccgctggcccgctatctcacaacgaagctcgggcgactgatgggaaacgggccaaagattgaataccgtgcgggtcgtcatactgccctgtatcgcagcgtgatgcttcctgagtacgcgaaggcagaacgaaaggccgaaggggacctgcggaatcacgcgctcgatgccatcatcttgggctgcgagcttccgtcggcatcggcattggaaaaccgcaagtggacgaaaaccgcgggtgacgtggcgcaatggatggagagcgtcaaagcagcgtcgccggcgatgctggagggaatgccgcgcgtcgagccagtcgagttcgttcgattctttgagcaagacgcaggcggcgggtactgtaccatcgacctgagcgccttcaattggaaccgccggcggaaggccgcccataagctggacccgttcggcaaaactgccgcgggcgttccatacaaacgggactcggcggcgaacgtgttttcagagctggtgaagggcgcggcggcccgcgacaagcagatcgaagtgatcgcacaccgcggattacgccaagcgttggcgctcgaccgagaccgagcgggagagacattggtcgcgtggctccagcagacgacaaaggcagggctcgccaatgagaatatgtcggcacatccagccgatcgcgaacggttgcggctgctgcaaaagttcgtcgagacgccagttgtcgagttcttcaagaaagacgaaccggcagggattccgtgggtgatcggggttcgctgcctcaatcttgataccggtggaccgcgaaaggtcaacgtccggcgctcgatcaacgggaatccggcggcgcagttctaccagtctgaggcggtcattcgcgagatgtacgtcggataccgggccgagcatgggcagctcgaccgccgacacccgattctgttcgccgtcagccagatcggcgaactgagccgaatagcgcggggccgctgggttcaagttgatatcgcagccgacagtcctttgcggggccgaccactcggagcgactgacgacttgggacgattccgtgaacagtgggacgcagcgttcgccgacgtgcgccaagctgaaggcattacgaagctcttccggctgacacagggctgtgtcatcgaaaagatggatggcacgcaattccagatcaggaatttcgacaagagcgaaccgtggatgtcgagcgagtcgctgaaagacatacggcggattcatcggtcgccgttccgggtgatgggttaaaccacaatccgacgtggctcgccccggcaatcatgccggtccccccgttacctgatgcccccgcgactcgcgagaagctcactatgcgaaagaagaaaaccagatcgaccagcgccgatcgaatcattgcagcgatcgaaagcgcagcgggggaaatcgtgtcagcaaacgacgcccgggcgaccggcgtgcggcaggctgatgcggcaatttgcaatcaaggctcggcgacgatcggggaagcagccagcttcataggatgcagcaagagaacggtctgccgactgatggacgccggcaaactcggattcacccgcggcgggaaggttcggaaagttccgcggatcgaactgtcgcgatatttggaacgcggttttgtgcccgcgactgattcttgagcgtctatcatctcgcctggttttgtcgccagtccgacacgccgtcggccgggcttccgccgagcgatcaaggtcgccaagctcccgccgattcgctttcacgatttgcggcacacacgcaacgcgcgatcaccgtcaattggctattaggcgcagcacggtcgcaaacttctcgttaacaaagtgccaaactgcaatcgcttcatcatggccgaagaacaacttgcagatccagaaaacggaaccgaccaacattctgatccacgccgtgcgtccagtccgcttgatctcggtacgcaggacatcaaattcgtgacgcatgccagcagactcttcagcggacatggatttgatttccacaacgtgctgttctacctcatccaaacgtgccagcagcaacttttgctggtcctcagtaaacggaacgtcactttgcgatatcaaggccgcttcaagcggaggctctgccataaccgtgcgaataaagtcatcagcctccacttcacgggcaaggtacttcgtccatttctcaacttctagccagcggtcattccagtagttctgcgtgcagttgtgcctctgtttgtcttctccaggcgaatattccgtgacgtgcattccgttttgctggaaatcgaaaagaaaatagtagccagtcggcttatgtatgatcttcgacaccacctgcgtcgagttgccgacttgcaactcctcccactcaaaatcgcgcgggtcgagtcctactgcgcggcacgattccagaacctgcttcttctgactggcaagcaagacacgcgaatcggcggccacaacccctcgcggctgcggtttctttctgttgcgcttggggcgcgtggttcctgcttgctgcttcggtggacgtgccgcgccatccgaggcggctcctgcagccgcgacctggccgccgactggctcagcggctttgatcgccgacgatggtttttcggcttgattgacaacgaaatcggccgtcgtgcgcgacccgagacgaatagtcgtcttttcggggagccagacccagcgctcgacgggaagtatggtgtcgtccaccgcgaccccatcggggaccgaagtaaatatggcaaagcgtccttgccggtgaacgatgctggcatggtagttgccgagctggggatccgaaagaacaacctcgttgtcgggcgcagttcccaggcgcgccatctcgccggccagctcgaagaccttgccccgattagggccggccgtgacggtaatcgttgcgctgacggacattctcggaaatttacgccggtctcagggatggggcgtcgcggcccggctgaccggggccagattagtgtctggatatctgcgttgccgaatgcccccggtgggagtcgaacccacacgcctttcggcagcggattaaccagagcacgcatccgagtgcgctggttcaatccgctgcgtttgccatttcgccacgggggcttcggttcaattatacgccgtcagtcgggttttgtcctgccgtcccgcgatacaacatggtcggctcaatttccgacaaaacgcgcgtcaagcaaccgcgagttagaaccgactccgagttttgacgtttgcgggcacggactggatcacgccaaatcacgatcggattattgcaaatgccaccgaaaccggactttcgcaaaccgcaacagaccaggtatcgcgatacccgcgaagatcagggaacatttagagcgacggttcctggaaatgtcgctctatcgcatttcaaggataatgcccgcgactacaaccatttctacaaccgaaagaccgcgctaaccccaattattccgcattttcggatgcatttcggccagccctgaaaagtgcgattcaccctatatttccggggatttcatgcacatttcgcgacgctgcccgtcgctttaggaaaccgtcgctctatcccctgagctacgggggccgaagggctgggatgctctgccagccaacggatcggcgaacatgcgtgaatcgccggcgcgcgacaaagcgctgctgaggtgcgtcgagcaaaaggaggcgacgtcaatctttggccttcgtcgccttcggtttcttgtgccccttttcgaaatcggcgcgcagaatgaacttgattgactgattgttgaggcagtacttctgcgcgaccggctggccgcctcccgcaggaggggtgccggcgggctgaccgccgccagccggcggaacgaagcctgccggagggacaaagcctgccggaggaacaaacccggcggggggcacgaaacctgcctggcccgcgggtggctggccgccggcagcgggagccgcgccggggggcgccgcgcccggtggcccgccgccgttggcaatcaattgccccaggttcgcgtcgcagcgggtgcattcgatccgcttcttgtcgttcgcaatcgcgatggccttctcgtcgagcacctcgttgaagcacggatagccgttcttcgcatcgtacttcgccgtcgaatcgaagagcggctgaccgcagcaggcgcaaacgtaaacgccgtccttcgaattcttccataggttccccgtgaacccgcgttcggtcccctttttgcgggtgatgcgaaactgctcgcgggaaaggatcttcatccactccccatcggacttgacgattttcttcggagcgccgtcatcggcgtccgaggtcttgtcggtgaccgaagcgtcgtcggtctggcccgctgccgcgccgtcgcccgttttctttttcgaacccgtgcttttcggcggggcggcgaacaccgcgccgaagacgaccagagccagtcccgtcgagagcgccgtcacaattcggtttcgcagcatcatcagcacctcggcgagccacgcgggtttcctgatgccctatcatcgccggttcagggtttggcgtcaaagtcaatcgggccccaggttctgaggatgtgaaaaaatcgaaccagggggacagtgtgtgaaaacccgctttcgggttttcacacacacttcgcgtgcatcttattgtaacgcttttggagctttggcgttgtgcaatgcaaaggaactacgaagggcgggctaatcaaaatgcggcatcgccgcattttaattaggaagtccccctggttcgattttttcacagcctctctgccgaattctcattttgttcggttcctagataacgaaaccgtcaggaagaaacgcaacgcaggcttgtctcattgtcgtcggcgggtgcatccgttaagcaggggtgccagcacggttcgaatcgggatgatcgcgaccttgtagagcctccgactggacactccgatggatattggcaactccgtggaacgctgctgcgaccccgctggggtcgaatcgaaactcgccacacctgatccgggggtatcgctttgctcaacccccggctaatggctgcgacccctctcggggtcgaattgcgactacgtcgcgaaagtaaggggggagggagaagaatgcgccgaacgtgcgccatgtcagcggtgcacccccggacaacggatacacccgtcgtcggctgccagggctgcgatagacgtgggcggtggatgatgtagtggtcacttccgaagatgtgttacagtggcggcatgaaccagaaccacaaagtgtgcgatatggacatggccctgaggcgcatggggaggaatgccgagctcctcagggaagtcattgaaatggtgcgtgccgatctgcctgagattctgaaccgactgcgcgcggcgttagcggccggggattccacgctggtgcagcgcgaggcccacagcctgaagggggccctggtcacgttcgatgcccaggccgccctctctgccacgcagcgcctggaacagtttgcgaatgcgggtgatctgtcgcaggcggccgcaatgatcgagggcgtcgcgcgtgaagtggccctgctcgacgccgcgctggcggccgagttgataaaggcgccgccagtaacgtaacccctgtctgggattcactcagactcgaagcaattgtatgctgaaacgtcgttcttcatcgaaatattgtgtcaatgaatgccaatgcggcggttcttgttctgggagcgggagtcagtgggctcacctgcgcgctgaatctgaaggaacgcggattcgacgtgaccgttgtcgcggaagattttgccccgcgcgtcacatccgtcgttgcgggagctttgtgggaatggccgccggcggtctgcggcactcatcaggacgaggacgcattggcccgatccaagaagtggtgccagatttcctatcgccagttcgcagctctggcccgcgagtcgaacacgggcgtgttcatgcggacggcgacccattacttcaggcagccggtcgtcgagagcgatgagcgcttgaggaagatgaacgagctccggcagcacgtcgatcaattcgtgcacgagccgtcgctgatttcaaccaatcaggtgaatcctgagttcggaatacgcgacgcgtattcgcatctggcgccgatgatcgacaccgatgtctacatggcctggctgctggagagggtgaaacaggccggctgccgcgtcgaatgccagcggatttccggcagtttgcgagagcaggagtcgtccttgagggagcagttctcggtagacgccgtcgtcaattgtgcggggatgggcgcccgggaacttgccgaagatgccatgtttcccgtgcggggagcgctgattcgcatgcgcaacgacggcaaggcgatgccgcggatcacagaggctcactgcgtctcgcacgacgaaaccagcaccgagccgaactttattttcatcgtgccccgcggaaatgaccggctcgttctcggcggattggtcgaacccgatgaatgggatctgaatatcggtttcgacaatcatgaaccgatccgccggatgtaccagcgctgcaccgaattcatgcccgttctgaaaagcggagagattgaaaaagccgaaccggtgcgcgtcggcctgcgcccctttcgccggcagcacgtccgcgtggaacacgagccaggtacgcgcatcgtccacaattacggccacggcggatccggtgtgaccttgtcatggggatgcgctctcgacgtcgccgacgcagtggaccgcgtcttgtccgtcgcccggtaacggatgaaacggacgaaacgaaacactaatcggcactaatcaacactaatcgaagcgtcggctcgcgctgctgtttttctaaccgccccgacggaatcatcgtcggtctacgtgacaatctaacaggtcatggaaggagatcgctgacccgacaggtgaaccccggcagaacatcttcgccggtcgccgtcgccgattcgtgcagaacgcgcccttcgtcaggcgtacggtaaatcgtcaacgtgcggtcttcgggcgcaattacccacaccaggcggacccctttggcaaagtactccttcagcttctcccgaatttgctgggacgtattgctgggggagaggacctcgaccagcaaatccggcgcggcttcgatataccccaccggtacttccctcaggcgctccttcgaccagtacgaaatatccggcccacggacgctgtcggggttgcgctcggtgatgaatccggtgtcgttgcacgccaccgtgccaatgccggcggcatcgacgaaagcgccaagtcggcggtcaactttggagcaggtcacgccgtgcaatcccccgggcggaggcataatgacgatctctcctcggacaagttcctgttgggaaccatccttcaggtcgggaatgaggaagaattcctcggcagtcagtagcttcgcatgggtggtcgtggacataacatctcctgcaaggtcaatcttagccggcgcccggttcgcactcaagaccggcaattccctgcctggatgcgagtcaacgtactctgggattcctttcgacgagacgagggcacacgggactaacctatcggtcggtgcccgccgctgaatttgacgaaaagacggcacacggagtgatgcctgctactctcgaggcgacttcgccgaggtggggcgcgcctgccaagcggaagtcgcatgaaatctgcgcggggatggtgccatccattaatcgtccgtgccctgcgcaggctgggcaaactcaaggttcgcagggccacgatcgtgctggttcgaagtccgcccggcaatcgcccacttctgtcagcttgccggccaggaacggctggcgcttcccccgcttgcagcgctcgacatgaccaatccgcgccgatacgctgattttgtaactttgaaacgtttgtcccggccgtggcatcctctttttgcgaattcagccgatgacatctccggcggtcgagaactttctggccaacctcgaaaaaagcaacttgctcgcagccgatgcgctgcaaaaggtgcgggcagacgccgaaggcagcggtgcaaattctggactggtcgaattcgcgctgaagctggtcgaacaggagctgcttacgccctggcaagtcgaagcgctcgtcgccggtcggaccagcttcttcctggggaaatacaagttgctcggcgagctcggccgcggcggcatgggggccgtgtacaaggcggtgcaaacgcgattggggcgcgtcgtggccctcaaggtcatggccacgaaactcgtgagtgacgagcaggccgtctcccggtttcgccgcgagatcgaggctgtcgcggcgctcgatcaccccaatgtcgttgccgcctttgacgccgaccagaccgaggggactcattttctggtcatggaatatgtcgaaggagaaagtctggcagccttgctcaaacgcgaacatcggcttccgatagcgaccgcctgcgattacatccggcaggccgcgctgggcctggcccacgcccacgaacggggaatggcgcatcgcgacatcaagccggccaatctcctgctcacgcgcacgtccgacggccaaccgctcgtgaagatcctcgacatggggctggcgcgctttaccgtcgagcgcggcgaagaaaccgagctgacttccaccggtcaggtgatggggactcccgactacatcgcgcccgagcaggcgcggagcacaaaaagggccgacattcgcagcgacatttacagcctgggctgcacgctcttccgttgcctgacaggacatcttccgttcgacggcgagagcgtcatggagaagttgatggcgcgggcgatgggggatgcgccgccgctgcggcagcgtttgcccgaggccccggcggcgctcgaagccgttgtggcgaaaatgctggcccgcgatccggcggcgcgatatcagacccctgccgacgtcgccgccgcgctcgaaccgttttcgacaatgaacctggcccgcgcgtccctcgcgagaacggcggttcctgctgccgcacgagatcccggcgtcgaccggctcctgcagcaactcgcgcgggagaccgacgtcgatgagtcgggggaaaccgacacgggcggcgggacacagttgccgatggctgcgggtcctcggcgaactggcgggaagctcttcgccagcgtcgaagaacgcaggcgggccgatcggcgacggataagacaatctctcttcggaacactgctgctcggcgtggccggcacggcagcctggtggtggtgggcggctggccagacgcatctcgaattcgactggcctgccgaggagcgtgctggggcacacgtggaagtcgatggttatcaattggctctccccgaacgggccgaaatccgcgttccacccgggcgggccggacgccgccgtctgcacatcgtccgccccgggtacgaaacgatcgacacgacgcttgagttcgcgcgtggccagaagcagacgtatcgacccgagtggacgccgactgccgagactgtccgtttgcagcagcttgcgggcctggattccgagatcgattccctgttgaaacaattcgccggtcacctgccgccggcggacaactcggccctgcaatcgctgcggcaacgcttcaccgagctgcggcccgcatttcggtccacgagcgaccagccacgattcgacacgctgtggcgccggctcccctttcctgccgactatttgaatctggatccctcactcgaccgcaacctggcgctcgaaccgctggtgatgtcgccaccgccgatggaactggtggcggcgtggggagatgctcgcttgaaagtaccagccccgcggtcgctttccgtctcgcccattggccgcctggcggcgacctggtctaacaacaatacggtgtacgtctgggacctcgataacggcaaattgtatgctcctccgatcgctcccttcgaatgtcaaggacctgcctatttcagcccggacggtaaattcctggcattcctgacggacgccatcgtgatctggtcggtcgaggaacggcgagccgtgaagacgattccccttccaggcaccgccaacgcctacacctgggttcccggcagctcgctgatggcgtggaccaatgaaaatcatgccattcatttgtcgaatttcgagaccggggaaatgctggaggatcttccctttccatcggacaacccgcaacacatcctcagcctggcggccagccgcgacgggaggtttctggccgcgctcggggctgctggaaaactccgtgtctttgagctcgccacgcggcagtggtctgatctgcctatggtcggagtgaccccgtatgtgctggccttcagtcccgatggcggccaacttgctgccggcattgacaatttgatctacgtctgggatctggcgacacacgaattacgtttcaagacggaacccggcgacaactggggaatcggtgttctgagctggcgacccgacggaaaacttttgtgctcgaacactggcacggctgaggtcctgttgcggaacaccgaaaatggagaattgcagacgcgcctctcaacccgaggatatgcccacacgcaggccgcgttcagccaggacggccggcggctcgtgaccgcctgctccgacgggccgcttcaagtctgggacgccgattcgtaccaggaagtccttcccaccgggcctttcgttgtttccgccgcgatcgatccgctcggcgaatggatcgcattaggcacgagcgaccggacgatcgagctgcgcgacctggcgagcggcgccattcgcgagacgatcgcgctgcgattcgtgccttcccggcttaaggtgagtcccgaccgaaagctgatcggggttgtcgccgcaccacccgactttcgtatgtatgcgatcccgctcgacgggcggcagcaggttttggaattgcgggagctgggtgcggcactcgacgtcgctttttcacgagattccgcgctgctcctggctctcgaccagggaggacacaatatctcgggctggaacctcgccgattctaagctgaccttcaaagccgcgttagacaatcccaaagtgcccgctttaggcttgcagatggccgtgagcggcgacggccgcacgttgttcgtcgtcggaggaaccaaccacttcggctcgattgccgctttcagcctgccggacg

SEQ ID NO: 110 - DNA, 4689 bp, Artificial Sequence
  Synthetic
ctcggcttcgatcgtcccgtatttctgaaatgggaaggtatccagctttaactcggctttctgacccaggtggatgaaaccaatgtcttgattaagtgccatggcttctacaatcaaaggagtcccatccggaacaatggtgataatgggttgtggtgtgcagggttcaaatccctgtaccgccaccaatcacacttaattatttaaatagcttacagatttcaaacccttaaaaagaccgtcaccagactgtcaccgcaactgaattaagagcctttcctaattctcattgacacccttttcgtaatttaatacactctaatcgatactgaagctatccataattaacctctaacccggtgggtaagtatgcaatccagggttacactatccattgattttggttataagaatatcggggtagccttggtcagggaccaagatggaatcaataccccgctgttcgctgggactctcctctacgacccctttcaactcagcacaaaggttggaccgagggcggaactccgcagaggccgccgaaccagaaaaacaaagaaacaccgtctaaatcttttaaaaaagaaattgttcgatacaaatctcccagaaggagcggttcaggaacttattactttttgtaggcggaggggttatagctctctgtttgatgtaaaagaaccccctaaaactggaaaggttgactcaaaagaagaaatcgtttttcgttttagcagggaagagttttttgaagcattggaaaagcagatagatagattggtacctgacgataaaaaggaaaaggctcttactttatgcgaagccatacttaaccgagccggtgaaccttctagagaaatccgaccattaagaattaataatcgaggagcctcccggtgtgcctgggacggttgtgagaatgtgacaccacgccgggataatgctctccgggaccccctgtcccaattcgttcatacggtatttgccgcaagtctcagaggcgatgcaaccctccaggatgaagtcgcaagaatgttggaccgtatcgccgaattagggaagaggcttcgccatcgtggaggcactaatccagataaagagcgtaaggctctcaaggcagaaatcagcgaagaacttaaattgttaaaaaagctgtatggcctcagtcctgatttgactgaagaggcggctactccctgggcgaaaattcggcagaatataacgaacctgatagaacagaccggagggcgaaatcggttctgccgttaccacagttctcaatatgtgacccacttcatggaaggtaaaccgttacccttcaaggcaactttgaccgaaagggatttggtgtctcgccgggaagaaatccttttccaaaagatgtggcgttatatcgaggcgagaattcttactcttgtccccgatggcattgaccgtgtgattgtagagcgaaccgccatcgaccttctggggggaagccgaaaacagcgtcaaggcattataaataaagaagcccttgaggaaatgtatcagcatgggcctcgatacggattcagcgatgaccttgaaatgctgagggctgaattcgatggtctgtgtgtgtattgtggcaggccaaatgccgaattggttgaaagagaccatcttctgcctcagtccaaatttttcttcgacagctacctaaatatagttcctgcctgcccaccttgcaatcgaaccttaaaacaagccgcctctccaggaggggcttcactcaggattcacgaacaggcatacgatgcctattctaagtttatggcttccaagtttacgaataaacctccccatttgtttcataccatcaagaagggcgtcctcaatctcatgcgcgagcctggtcgcgtctgggaggcggagcagtatctcaacctcatcgccaaccagtttgcccaggtggttgggacccaacgaggacctcgccctcttgcccgttacctcagcgggaagatttataaacggtttggggagaagccccaaattggctttatcaatggaagacacaccgctctctggcggaaagctgcttaccctgaattcgataagtttagggagaaaaaagagggtggtgttatcaaccacgccttggatgcactcctgatggcttgcgacttgccggacctgacttctcttgaagcgaggaacttacagcccggtttgatgtattggtgggttgacaaggtgagaaaggctgccccacccaaaggcccagatggaatccctgtgatacccgaaccacgctttgccgtggctggttttgaaaaggttcaccctggaaactatattgaagctgaattggcaaagatgaactggaatcataaagacactaaggtccaacgccaaggtgcctatggctggtcaaaaaaagaagacctacctgtccagcgtgttacggctgcgggtctcgctgacgaacttcgtaaggccaacaaaaaaacatctccagaattgaggagggcagaggtcgataaaatcgtaaacgtgattgtccacccgcaacttcaccaaaccctgaagatggcaaatattggagacactccaggtttaagcacggcagaagcacttgcactctggttgcgaaaaacaattcggggtaacctaagtaaagcaaggttttcctctcatcccgcagaccaatcaagagctaaaatgcttcaggatttcatcaacgggcagtctaatgtaatccctgcagtcattgcggtccaaatactctatccttcgtttaaatccaatatggatttaaatcgagttgacccccaaagcggtcgccttgtacatagatatgtcgctgacccggcaaatgtggcttacatagtaacctatcgaggaagtaatggtgatgtcaaacgagacagaccgctaacgcttaaatggcgccagagcggagccgtaatccctggtgtcaaattgtttggagatgttccggaagggccattaagaggccgcgcattgggtgaaaaaacgattgaccagaaagaatggaagagtgccttgcatcaatacctgatcagggcagggatagctgaatataactttgtgtctcagggaaatgtagtggtttatgaagatgggagcgaattgtatatcaggaacttttctggtagctatggttttaaaaagtcctggttcaaaggaataaaagcggttcgaccttcgccgctgaccgagcgattgattccaaacgcaaaactttagaaagtttcggtttagttctttgacaactggatagcgtgttcgggttcaaactgaaaagagcatctgttcggaaggaccactccgggttagggcagacccggctcttgggcttccttggtcttttgactctggaggaaaccttccggcgtgtcgcaagacaagatgtgagcctattttaaaatttatttatcttgaattattttattagtcaccctgaacatctcaaccttgttgagacattattattttggtttggcatggtttaagcattatgtttcagtcaccctgaacatctcaaccttgttgagaccagcccttgccgcagaagaaatcttcttattagcgtttcagtcaccctgaacatctcaaccttgttgagacgctctggcatctgtcctcttttaatagattatatgtttcagtcaccctgaacatctcaaccttgttgagactctgggcctttcatctgtttttgctccttggtaagtttcagtcaccctgaacatctcaaccttgttgagactgctatccaaaattcataagtatttaggcgaagatggaggggtgtttccgcgaaccctattttaaacatcttaaagtttgttgcgtttatttgttaacataggtttaataagttgatttacttctaaattttagaatcgcgaacctcccagcttttgttgattactaatacttcatgcttaaatctatctcctttgtaagaaaacttttcatttattattatccttgagacatagttatcatattcaagaataagaaattggcttcactctatataaagaactggcaggagcatgagaaacattctgaagtatatggtgggaggagggcgataggtgtgagccccttggctatcatcaaatattgacaaatgggagttattaaaaatttacatggaggcaaagggaatgggaggggattgtcaaaatagcaaattcagaaagtggtggaagaaaatttggaagtataagacggtaatccttgctttcgcatgggtaatttcttttctactggggacaggtgcagtatggcaatggtttaatttgcaatttgaaaaacaaaggaatgaacttgatataatcagagtatctatagaacttcgtgacaatatagaaagtaaattaattaaactttttgatattggtattgaatatttaaaagaagaagacatccccaaaaaatcaagactaaagatacaatttgatttagagcttatccgtaaataaatattacttgtcgaaaagcgatcaaggcacatgctaattccaataatccctcgtaacttgcagccagtttttcaaaccggaccattaattttcgataccgattcaaccacgaatgtgctcgctcgaccacccatctgcgagcacgatatcgagggttctttctcttggctttcacttcctcgccccgttgtcgcacgtgcggaatgta

SEQ ID NO: 111 - DNA, 3332 bp, Artificial Sequence
  Synthetic
aaagacttcccggccgctggcccggctcaaggtatgggaataaatcaggggggtgtggaggattaccccggtcaggcgtgctttggcttcctcaatctctttcagggtcatggcacgaaagataaaggcggcctcccccagggagaccgccccgggtggcgttagcgcgcaaatttaacggaatccaagaccccttgcagttcggaccgggccgcgtcgaactggtcggggtgggagaccacgccgaagttataatagtagttgtccttgtcataacattgccagatgatgcgctgatgggaacctccgcctcccttgcgggattccacgatctcccagccgatgatcttccctcccgcgtcatcccggcgcttggcggtaagaagtttgccgatgcccacctcttccttggcggtttttaaggaagcgtccaccgaggacttggccggaaagctgggcaccatctgggtataatggatatggaagaacatggtggttcctggcttcccgaaaccttcgcccgcggagttgggttttccttccgtccttttgtaacccgcggggatggtaaaggaaaagttccgctccgtattcttataagtcacgggggccgtggatacgggaccggttttggggtcatccgcaaaattaaggggggcgtctttatcatctttagccggtgccgccggtgccgcggattccgccggtttcttctccgcttctttggcccggcgggctgcatccacgccgctttggaccgcgccccattgagccgacaccagggacgccatcaagagcacggagagacccaaaaatcctaagatccccaaggtccacactgttttcctcattttttcctcctttagctggaaggttataaagatgcgagcctcaagcgtgctgcgccttgcgccagcccgcggccttaagcgccgccacatgttccaaccattcgttcttcaaggacttcagataaagggccagatcctgctcgatgaggggcgccaggcgccggtgcagccgggtattcacctcgtggtcccccggggagaggcccagccaggtcaggtaaccttcgtcaaaaataaatgccggggtggcccggtgcttcaccccccggatttccagcaagacctgggcccgagccacgtcatactccaggacccagccgcagtcctccagcatggtggcctcctcccactccacccggctgcgacattcaggacagtaaagattaaccaggatctccggaaagaggaggttgtcccggaagatgaggaaagcggaactgcggccacagaggcagaagcggcgttggttcatgcacatggcgaaatttcccagagcctctttaaagtcttgcctactaaattccaaattactagttttccactataatgacaatagacttaattgccgcctgcataaaagaatgaggtggggaaaagtttaaagacggaaattataatcgattgggattcccccaaggccccagcccctaccttcgcaaacctgaattttcactaagacccccgatccatgagaggcccaaggctgcgtttttatttgttctcctgggcctttgatgctatgttgggcatagtcaaactttttcgggtactcaccatgaggtgcccatgagctccacccacaccctcgccattgacttcgggtccaagaacatcggcatagccctggtccgtaatcaggacagcctcaacaccccactcttcgctggtaccgccctctatgaccgcttcaccctgagcaagaaggtagagccccgcgtccaaatgcggcgcatgcggcgaacaaagaagaccaggaaggccagattggcccacctggaagcaggtttgctttcccatggtctggagcccgacgtcgtggtatggctggtcaatttctgtcggcggcgggggttcaagtcattattcgatgagggtagagagcccagaggggaaaaaaaggaagaggaggccgaggtcttccgcttctcccgcgaagagtttttcagcgcccttgaaaatgagttattggagcgcttgcctgaggaaaagttaatcccggtattggacctctgtgagcatggcctgaaccgggatggggaccgcttcaaggaggtacgcctcatcaggatcgacaaccgtggcgcgtcccgatgtgcctgggatggctgcaacagcgtcaccccgcggagagacaatgccttgagggatgccctggcccaattcgtcttcacggtctatgcccagaaagtccgcagtgatccagacctctatgagaaaatccagcgcatgcttgatcaactggcacaactgggcaagcgcttacgtcatgtgggaggctcagacccgaagaaagaacgccaagttctactcaaaagaattagagaggagctgaagcttctcaaattcctatccggactggcccaggatttgcccgaagaaaccatagagccgaaggaggcctggacccatatccggcgcaatctgatgaacctgattgagcagagtggaggccggaaccgcttttgccgccaccacagcgcccagtatgtctatcacctgatcgaaggcaagcccattccttttaagcgatccctcactgaaagcgacatgacctcccgccgggaggaaatcttgtttcagaagctgtggcgctatattgaggccagagtccttcccctggccccggcgggcattgatcgggtggtggtggaacggacagccttcgatatgctcgcaggcagcaggaagcagcgccagaaagtagcggatgactatctggaagagatgtaccagcagggccccaggtatggcttcaaggacgatctggagatgctgcggaaggagttcaacgggctgtgcgcctactgtggcaagcccagcgaaaccatagtcgagcgggaacacatccttcccaaggccaacttcttcttcgacagctacctcaacatggtcccggcctgtccggactgcaatcgcatgtggaaggccaaggcttcccccggcgcttcaggtctcaggatcaatgagtcggcctatcaggcctattccgactatcttgccgacaagttcaagaccaggcccccccacctcttccacaccatcaagaagggtatcctgaagctgatgacccagaaggatcgggtcctggaagcagagcgtctgctgggaatgattgcggaaaacctggggagggttgtggagtcgcaacgaggccccaggcccctggcaagatacctttgcgagaagctgcgacagaggtatgacagggttacgcagatagccttccgtagcggtcgccacactgctatctggcgtcaggct

SEQ ID NO: 112 - DNA, 4157 bp, Artificial Sequence
  Synthetic
ggttaaagatattgacgaggcgatcagctttgccaacaggacacccttcggattgggggcgagcgtgtggacgaagaataattcagagatagaaaaactcattcaggagattgaatctggcgcagtttttgtcaacgggatggttaaatcagacccccggctgccttttgggggcatcaagcactctggatatggaagagaactgggtatctacgggattcatgaatttgtgaatataaagacggtgtgggtgaaatagcaaaaaagcaatatacttgcaactggtttaggtttaatataaattaaaaaataatgacttaaattcaaataagcagatagggtatgttagcgaaacttaaaaaatattttagcgaaagaaaagatattgcatttgcttttttgtatggttctcaggcaaaaggaaacgctacaaaattatctgacgtggatattgctgtatacttttatccccggcaaaagcatcccgtggaatatgagtcaaaggttttttatgataatgaagataagatatggggagacctcgaacggattctaaaaaaggaggtggaactccttgtgctgaaccgggtttctgccagtgtagctgcaagtgcgattagggcgattcctcttgcgatcaatgattgggggatttatctcgattttatggaggttataacagatgaggctgaagattttatggaattagttatcaatgattataaagagaggataggatttgaaacgagaggctaaagtaaggcttattaaacatataacctttcttgaaaacgaacttctggattatgaacgattcaggtcattgtcatgggaagaatacgataaggaaagggataagagaagaaatgttgagagatggattgaaaatattgtgaattcgtcaatagatattgccaagataatcttagcctcagaagacagatcactccctgatacatacaaagaagttgtatctaacctttcacttgttactggtttcgagagtgaaactatggaaagtcttgctgaacgggttaaattgggaaacattatttcccatgaatatctggatataagatggaattctataaaaagatttactcaggaagcagagccgctgtataaaaacttcgtagtaatggttaaagagtatatcaaagaaaatatttaactgtcggggcggatatgcaggttcaaggtgcattgcccggagattataaagccgtctttgtattacaagcaaaggcggttattttgttttaggggggataatgagagctaaaacaccatgtgaaaacgaccccaattccctttctgtataagagatgattacccttggcattgattacggcgcctcatatatcggcgttgccctcgtggaaaacaccgggaccggcaacaggcctctcttcgccggcaccatcgccataaatgcccgcgatttgaaagatatggttgaaacacgggcaggcatcaggcgcctcaggcgaacgagaaagacaaaaatcagacgcctaatgaggctcagggaaagccttcttgcctgcggcataggcacggaccaggtcaccctcatcgtccgcttctgcaggaaaagaggttataaatctctttttgatgagggcgaaagcgaaacccgcgaaaaagagagcgacctcgcttaccggttttcccgtgaaaccttttttgaaagcctcgaaagggaactcggcctcatccttccggacaaccatctgaaacctcaagccctgtcagtctgtgagagggtcctcaaccggaagggagaccctttccaggaaatccgccttatcaggatagacaaccgtggagccagccggtgcgcctgggagggctgcagcagggttaccccgaggcgcgagaacgccctcactgatcccatcgcccagcaggtctataccacatgccaggaaaagataagagaaggtggagagcaggcaagggaaaaggttgacgatacggtcagtcagcttgccaccctcggcaagcgcatcaggaacgcctctggagaaggggcaaacaaagagaaaaaagtcctcaggaagaaagcgcgtatgctcctccgggagataaaggaactctattaccagccagccagggagaccctggatggtgagaaggcgtggaagtatattgagaccggcgtcctgaacatcatggagaagtcacaggggagaaaccgttactgtagagagcacagcgccgcctacgttaaaacagtcctcgcaaacgaggcaatccctttcaagcagaccatatcagagtcagacatcatctcgcggagagagcagattacctatcagaagctctggcgctatatagaggcacgggtgcttcccctcgccccctgcggcattgaccgcatcgtcgtcgagcgcaccgctatcgacctgcttgccggcagccgcaaaaagattctggatgcctcagaccaaaccaaagaggagatgtatcagcatggacccatgcacagattcgaaagcgtctcagaaatgctgcggaaagagttcaatgggctgtgtgcctactgcgggaagcaatcggattctctcatggagactgagcacatcctgccccgggcagagttcttcttcgatagctacctgaacatcgtgcctgcctgtccccggtgcaaccagagtaagggagcgcgcaccccctcggctgcttccctgaaaatcaacggcgaggcatacgaggcatatacgagctatctccagagcaattttcgcacgcgtcccctccaccttttccataccatcaagaagggcgtcctgaacctgatgcgcgaccctgaaaggcagtgggaggcggagcgttacctctccctcatcgccagccagttcgcccaggtcgttcagagccagcgcggaccacggcccttcgcacgctatctcttttcacgactgtcattacgtcaggtcagaaagcctgaaatcgtattcaaaagcggacggcacacagcgctctaccggaatatcgcctaccccgacttcagcaagtatgcagaaagggaagaagggggtgtagttaaccatgcagtagatgccatcctgcttgcgtccgacctgccagacccgaagcctctggaagcgctcggcttctctcccgctgatatgcgcaggttctgccgtgccgtcaggcagaaggccccggttgcaggtgatagcggcgtgcctgagcctcccgcccgcgacttctttgtagagggctttgaatctgttaaatccggctttgtagaagtgaggcttgatgccatgtgctggaacaagcgtgacagcatgacccacaagcaagacccctatggcctttctgagaaagtaaatcttcccaccaagcgggtgagcgcttttggcctctgcagcgaactggaaaagatgaaagatgaaaaaggagtgaaaaagaaagttgacctcattcatcaccctgccctgagaaggactttaggagacgccatcaacccggaaaaccccggcaaatcagcggcggaagcgctcagggcgtggctgagcgaatcggtgagaaagagcatccagacgtctgccttctccaacaaccccggagaccagcaacgcaaaaaggagcttgagcagttttcttcctctgatgagtcccttatcccggcggtaatcggcgtcaagatgttcgatatgggggtgagggggaagattgacctccagaggatagacccgcagaccggcaaaaccgggcaccgctacatgacccagcctgcaaaccgggcagtcatcctggcgtatccgaaaaagaaaacaggcatgacggatatgtccaagccctgcattgcccgggtgaggcagaactattcccttcttcctgagggaaaaggaatcttcaaggaacttccggagagattgaaggagggcataatactcggaaaagagaataccatcctggacggctggaacagtgaggttgagcattacctctcagtctgcggtttcagcagttatggcatgctcacggcgggatgcgttgtctgctacggagacggcaagaagtggtttctaaaaaatttcgatgaaagcaaggaattcagaaaggcgagactaaggaacgtcgttggtatcctgaggtcgcccttctccggaagaatgacgccattaaagcctttgactgag

SEQ ID NO: 113 - DNA, 13491 bp, Artificial Sequence
  Synthetic
catcgtactctatgtgaagcaccttctgtttcggaaaccggggccgatgctcacttctcagcatctacggccctgtcgccggttggcgccgtccttgcggcgagaccgcgtcagggcgaatcgacatcgacgattcgatcacaaccccaaatggaggttaccatgaaagttgttgccatagattccagcccgagagccgacggcgtcagcaagaccaggatgttgttggacgctctgctgaaggggatgcgcgaagccggcgcggaggtggaggcgattcatttgcgtcagaagaaagtcaagaactgcatgggctgctacacatgctggaccaaaactccgggtgtctgcaccatcaaggacgacatgaccaacgagttattccccaagtggctcgcggccgacctggccatctacgccactcctttgtaccactttaccgttaatgccaccatgaaagcgttcatcgaaaggacgttgccggttgcagagccttttatgcaacaaggggacggcaggacaactcacccgctgcgccacaaagctccggaagccgtggtcttatccgtggcggggttcccggaaccctctgtcttttcgcagctctcctcatacgtcaatttcctcttcggcaagaggctcaaggccgagatctaccggccggctgcagaactgatgccccttcccgaaatggccgagacaacgaaagagattcttgaagccgcggagcagggtggccgggaactggttcaatccatggaaatttctcgcgttactatggaacgtatcacccagcccattggaggtggctctgactctgtcgccaaattggcaaacgtgttttggaagtcttgcattgctgaaggcgtgacaccagcggagttcgaacagaggaatctcgtgccacgtcccgattccatagacaccttcatgctgatcatgtcgaggggcttaaatcccgaaggctctgccaacacccgcgcaatcgttcagttcaaattttccggtgaagtcgaagggtgtagctttttccggatagagaacggaaccattgaggccagggaagggctggcagacaagccggatttgaccattgagtcgcctttcgacgtgtggatggacatcacgaccggcaaggccgacgggcagcagctgttcatgcagcagaagtacaaggccactggcgacttctcgctgctactgcgcatgaaagatctgttcggcaaacgggcaggatgagtccgaccgcaaagaagagccacaatggtcaagatcgcggcgtaaccaggtcgctttcaaagaagtaatctggggagaagcttctttgcacacagaagttcttcgcgatcttactcttttgaacgcgcatcggcatgacgcgtgtggaccgcgattcaccctgcctggaattcctccgcattcgggcagtcttccacggaaggttgcgggacccttgtttgcacaagtcgacgccggtgaatatcgtcaatgaaagagatgattggtaagcgccgccggtggctggaagcggccggacataattgatcggaagattagaggatagtcgtcagatgaagcgaatttactacctccttactggagtactcggcctgaccttcatattcgctgccggtctcgtcatcgtggaagcagccggaggaccgacaatggaccggttccactcattctggatcgatctgcacagagccagctcggtggggtttgcactgttctgcacgttcttgactgcggtatggggagttattctcgggctaattacggatcagatcatgaaattgactggaatcgatctgaaatcgagagagattgttgaattgtgattgtttgagagaacgaggcctagtcgaccatggagtggctgttcatgcatatgcccatggccggggtaaatgtgttctggcccggattgctcctcatcgggttctcggtgggagttatcggcggctttttcggaatgggcggagcttggatggtgacgccgggcttgaacatattgggctttcccatggcgtacgccataggaaccgatgtagcacatatggccggcaaatcgatagtgtccactcaccggcatgctcagttcgggaacgtcgatttcaaacttggcgtgaccatgattgtggggaccgttgggggaatagaatgtggagcacggatggtcatgtggctggagcatctcggttgggtggaggccgtggtccgctgggcgtacgtcggcgtgctcgcgtcggtagcgctcttgatcttcgctgattacaggcaagccgtcaagaatcaagaggccggcattgtagaagaacgcggggcggtgggtttcacttggtacaagactctgcacgagatcaagatcccacctatgatgcatttccctgtcgcagacgtatactgttctgtatggctccccattttcgtgaccttcgttaccggcgtcatggccggtttcctcggtattggaggcggtctgttgcggatgcccgcactggtccatctggttggttgtccgacgcatattgcgatagggaccgacctgttcgaagtcatgatttcaggactttacggcacgttcacgtacggtgtgaaaggccggatcgaaatggtcgcggtgctcgtgatgttaaccggggcagcaataggcgcgcagatcggaaccgtggcaacgaagtatgccaagggatatggaattcgtatcgcctttggactcacggccgttgcctgcatgatctcggtcttgttgaagcagttctcgtacccggggcccgcaacgatagtaatcctgggatcagtggccacgctgtgcctgtacatttgcatgattatgttcaagggggcaattaaagaattggccgagatcaaattccatcaatggaggatcttcaggcgaccgtgggagagaaccgcggaaggcttggaggttgcatgcaggacgaggacctcggagacctgtcaggagtttctgcaagacgccaaactggaatatttgatagactcgtttgacagcgacaagaactcccttgaaaacctgcacagcgttcatggcggcgggtttgcctggtgggttcgaccggcgcccgaccggccgtggaatgaacgcttcggagagttcgacatttcagagcagctctactcagcgctgtttcatctcggcatcactgaccgcctaaacgagctgcctcacgacgggcttctggatgcccatgaggaaggaatactgttgatgtccggtctggcacgtgcttcggaactcttgaaagagtcagccgagaatcttgtcgaagatagttatgaattgagttgcggcaaacgaattggtcccgaagagattgattgcaagatcgaggtcgaagcgaaaaccttgaaacaagacctcgcttctttggctgaattcttgcgctcggccggggagaagggctttgatgtgcaactgtggctctgaccgcagtgctgttccgtaccctcaaataactgctcggtcgcacgcagcgtccgtatgttcagcatgataccaggtcgctttcaaagaagtaatctgggcagactctttttgaaaaagggtttctccccagactctgttgagcgcgcatgagtatgaatcctacgtagcagccagccgcgcgacaggccatacaggaaccgaagacgtagactccactttccccggtaatcccagctaccgctacagctaatggtccggcttgctatccgaggaactcacctctgcgcactcctttgcctaagggagtttttcgagcaggaactccggcgcaaagtcagctccgttttgccacgaaagtgtgttgtaacggacttcgaagccgccgaagtaccgcacgtccgtgagtggttcgaaaattgggccatcgagctcgtcggacaggtccagctcccccgaggcaccgtcgtcgaatttgagccacactctgtgaccaccgagatgctttgtttcaatgacgtgtggtatcatagcgttactccagggagggaattggctcaagaggctgtttctcggccgccagcgcccaatcggcaaggagatccttcttgtgtaggaggcaccattcaaggacaagaccgagagcacgtctcgggaacccgccgacacgacccctttctcgatttcaaccgtggtctcgaattcccctaatgccgcatggaaatggggcggttcgtgatcgcgataataaatgtatatggagatcccaaggaatcgacttatctccggcattctgatcttccatccacgaccgaattcaggggactccgtctcaatcctggtttggaatcatattttcacccggaagcttcctttctcaaggcgaccgatgaagcgggcactgtcaagcggaacaatgtcgaggggttccgaatgctcatttgagggatctagagaaggcatccggcagctaccggccgtccgacgcgaccgatgcgtcgccctggcctgtgttacaaagattttcgataaatcggagtacctcacagagattcctctgactaaacgaaaggttgcgtggtattctcggaaggtgcctggtaccccgaaagcaggcaacccgaagaatgaagacgcccccgtagctcagagcagccctttccatggggcagaaataccggatctcacagcggcagcttgaggcggtgtttcagagattcaagtaagagggggctacaactaatgtagtagcctaaatcttcggacggtcgttagcctgtcttcccatttgtcaaacctttcttcggtcaagttcatccgcagatcttaagaaaggcggctccactgaaatgatcacactgggcatcgattacggcgcatccaatatcggtatggcactcgtccgtaacacatcggaagggaatgagcctctctttgcagcgaccattgttctggatgcacgaaggctgaaagacaagacggaacctcgtgcggccatacgacggctgagaaggacaaggaagacaaaaaaacggagactcggagaactgaagacgaagctcttgtctttagggatagatattgagactgtttcccggattgttcgcttctgcgagagacggggttacaagtccttgtttgatgaagggggcccacccaagaagaaggcggacgaggagctaacataccgcttctcccgggaagagttctttcaacaactgaatgaggagttggtgagcattctcgagtttgacgcaatggctaagcaggccctcaaggcctgtgaacgaattctcaatcgcgatggtgatcgtcaatttgaagtacggcccatacgaattgataatcgcggagtgagccgatgtgcatgggagggctgcaacaagacaaccccgaggcgaataaacgcgactgatgaggccataaaacagcaattggttaccttttttcaaggcattcttaaagaggaacctggcttcctggaggatatgagtcgagccgtttctgaattggatagaatttcacacgaaatcagagcagccattgagcggcaagccaccgaagataagaagatgcttgcgaaaaaggcaggaatggttttgaggaaactcaaggagaacctctggagttctgaggatgttgacgaccggatgaaaaaaacatgggagcacgtccgaaaagggataatgaatattctggagaaaggatacggcaggaattcgtattgcagacagcacactcaggagtatctggatagagtcctggctggaaaaccaataccgttcaagaagtccattgcagactccgatatcatctcacgtcgggagcaaatagctttcagtaaactctggcgttatatcgaagcaagaattctgccattggtccccaaaggaattgacaggattgtcgttgaacgaaccgccttcgatctcctggccgggagccgcaagaaagttggcaaactctcggacaagtctttggaacacatgtatcagttggggcccatgtacgggttcggcaatgaacacgagatgcttcggacagaattcggaggcctgtgcgcgtattgtggcaacccctcagatacgttgatcgagcaggaacacattttacccaggcgcgacttcttcttcgacagctacctcaatatcctgcccgcttgtcccaactgcaatgctgaaaaagggagaagacgtccgggcccggcttcgcttcacattagccaagcggcttacgaccgatattccgcgtatctcagtgacttgggaaggaaacggccgcttcacttgctccataatgaaaagaagggaatactcaatcttatgcgcgaccctaacagggcatgggaggtagatcgctatctcagtctaatcgccaacaacctggcttcaatagttcaaagccagcgcggtccgcggccgtttgcccgtttcctttactccaggctttcggaccgtcagcagaaagctcctgaaattagttttcgcagcgggcgtcacaccgcgctgtatcgcaacatagcctatcctaattttcgaaaagaccaggacaagtcagctggcggaaccattaatcacgcactggatgccatcctgctggcttctaagcttccggacccaacgccgttggaagcccgagggttgaacgtccacgacctgggaacctggtgtcgaaaggttagagcccgtgtgcctaaatccggaaaagacggcgtgcctgctctgccaggatatgactggtatgttccgggtttcgaaagtgtagacgccaacgggtatgccgtgatcgaaatggcgacaatgaattggaaccaaaaggacgccgcgactcacaagcaggacccctacggatggtctgcaagggcaaagaaacccacgaagagaactgcggctctggaactgtacgagaaactgaagacgaagaaagccaagagtgagattgaaagaatcgttgcaacgatccatcacccggcgctgagggcagctatgtctaaggaactcgaaacggcagatcccggcgccgcagtagccgaggcaatgaaagagtggcttcgggaatccgttagccaaagcatcaacaaatccgaattttcgaggcacccggccgaccttctaaggagacagcagctggtagagtttgcgaataacggtgggctcatacctcaagtaatagggatcaagcggttcgacaccggggttcagggaaagatagatttggagaggatcgacccgtttacaggcaagacggggcaccgttacatggcggacccggctaaccgggaagttgtcttggcgtatcccagcggatcagatggaaaagccaacctgtcgaaacctgtcacggcaggggtgaggcagaattttgcgctgaagaccggcggagaacgaatttttggtcctaagcctttggaactggaggggggtatagcctggggcaacggtacaccgcctaagaatggctggactgaagtgctcgaaacatatctcgcgggatgcggtttcagctgctacgtccgtctgactccatgctgcgtgatctgttaccaggatggcacacagcattttgtcaggaattttgacaagaatgacggtttcaagaagagcattctcgagaacgtgataggtgtgaggagaactcccttcacttccaagatcatgccattaaaagtgttgacacagaaagccgaaagatcgtaatagatggtcatccgttctttgacaaatcgtttcgagaaatcagttccggttgaaaagagcatctgtctgacaagcactccggaatagggcagttccggctcttgcggtttacggtgcggacacgtgtcgttgaaacacattgtcaggcgcgtcgaaagacaagatgtgagcccattttgaaactgattctttcatgcggttgccacatggtatctgatttcattgtcctgacaccggacgtttcaatcaaactgattctttcatgcggttgccacatgcccatgtcacggttgtgagcgccgagaatccggtttcaatcaaactgattctttcatgcggttgccactgtccgcactgtcacgaagcgattttcccgcaagtttcaatcaaactgattctttcatgcggttgccactgcaggaacgatttgtcaaagaataaccgaaagttaatgctcgtcttttgcgaatccccgcattcacggatctgacgcatcgggaatgctgaaattgatatgtcaggttagtgcgttacgtagccgggattccaaggcaaagaagttgattgcgaacctggctataacaaaagagttgatctcttgtgcccaacacaacagcttgattaattgaatctgtatcccggtctcgctccttggtgtggggagcttcgggttcgcaacgcattcttagactgcagctcactgtaggcgacttcctctcaaggacgtctgggaacatattgcatttttccgcaggggccgctttcgcgcgcagcccggtcataccttgctcacgcccttaccatcggtaacgtcaacggcccccagttgacagacatcagggcagagtgattactagcgcgtactcctgccttacctggttggctggtccaggtcttctgtctggaggatctctaggacctgccgccgaagctccggaacatcatcggtggttgttgcccagacaatatcccattgcaccgcaaagtatgcgtggacggcaatgttacggaacgccgcgatgtcgcgccattctacctgtgggtgtgtctcgcgaaatgcctgcgataggtgagacgcggcctccccaatcacagtgagcttctggagagtggcagccttgtgcagttcgctggccaggaacgtcgcggcatccatcccttccagaaatacctgaatcatctcgcaggcctcaaggatatcatgcaaatagaggtactcacgcctcatacagtactcgtgcggtggccagaacatggtcacgaatgacgggtttgaggccgtctttggtcaccaggtcaactttgagcccgaatagggcttccagatcgcgttgcattctggccagcgttacaaaggtaactcgtgccgttggatgaaagcttaccaacagatccacgtcacttgggggagaggggtcttggcggagcatggatccgaacagagctagctcccgcacctggtagcgacgacagacgctcgctagttcttcggcggcgatgttcagaggcatcgcttcattcatatcgttggctgcctcaaggccttctcgcatgtcagtgcaagggcacacgagcggctatggaccgggtgcactctcgggtctttgttcataatggcttggcctctttgagaatacggcggcggatcagccaatagagtcctttttcactcacaacatcgactctgcttccgagaagatcccgaagatcagccaagagtgctgcgacctccagcagactgcggtcaggctccatatccaccaacaggtctatatcacttgactcgtccgcttcaccacgtgccacagacccgaacacccggatattgcacgcgccatggcttgcagcgatcttcaggatgtcttcccgcttttccttgagtagctcttcaacgctcatgctaatgcccatgtcccaacctagcgcgtgaaagcgtttctcgtcaacgattaagtatggagttggtgtaatcccggatctgagacgagaacccgcgggatttctgtccgcgggccttgatccggcccattcaggacatatagttattgttagacggtactaacgttgtccccgggggcaagtgcatcgagcgttccgtcaatcgagcgagaggagtacttacggcaatgcaggcaattcccattgaccgaaagcgtcagccaacgatagaagtccgaccccggccttctgtgcaaatacatgtcgttacacctctttggggctcgccatccctcagcgctgcaatgggcgctccggtatatctcaagatggaagcattccagcccgtgggttcgttcaaggctcgaggtatcggccttgcatgcctggacagttgggaggccggtgcgacccgtctggtgtctgcctccgcgggcaacgcgggctatgccgtggcatattccggacataaaatcggcatcccggtcaccgtcgttgtgcccaagacgacgccagcctggctccaaggcctggtccgtagagagaaagcctcggtcatcgttcacggggattcctgggacgacgcccatgcctacggcactcagttggccgacgagcaaaacgccgcgtatattcatccctttgacgatcccagagtctggaaaggtcattcctcgatcattcacgagatcgtagacgctggtgtgaggcctggagccatcgtggtttccgtcggaggtggcggcctcctctgcggcctgctggagggtatgcacgatgtcgggtggacggacgtgcccgttctggctgtagagacagagggagcagcctcctttgcagcggctgtacgagcgggtcatctggtgacgctggaccgtatcacgtcggttgctaccacactgggagctcgcagagtggctgcgaaggcgctcgattggaccaggcggcatccgatcacgacgtggcaggtcacggatcgagacgctgtggatgcgtgtgtgcgattcgcggacgagcaccgtgtcctggtcgagcccgcgtgcggcgcgtcgctcgctgcggtgtacgggagagccgagccgttggaaggcctgcggcccattgtcatcatcatatgtgggggagctggtgttagtcttcgactcttggacgagtggaagaagacgctgggctaatgccgaagtaccacccaacgagtcgcgtttgaaagctcgtcggtacgatcgtgctctcgggattgcaattgcggttggtcgatagtcgcggtaatgtatatttacgatacgcgataaatctattttctgggcaattcattactgcttcatgagtctcgcgcaaggccaatcgagcgctgacggggcagtggacatgtcgggaaacccctcaacataggaatcaggacaccgaggaataacaaacaccgggatgagcgcgatccgggttggaggtagagtttcatgtacaaaaaattactggtgcctttggacgggtccggcaacgacgaggtcgtcctggaacatgtgaaaaagttggccaaggagtttgacgcgacagtgaccctcataatgctgcacagactcgcacccgcggaggacgcattcgagaaacagatgcagttggaggacggggcgtcggggtggcgagccaaacgaaaagccgagacttaccttccgcatgtcgagcatgtgatgcttgaggcagggattagggtaaatacggaattccttttggtagaggaacccgaggcagatgccattgtaaaatatgcggaaaaacagggctgcgatctgattgtgttcgcgaatcgtgagagatccccgatcggcaggtttttcttcggtaacgtcgaggagaaggtccggagaaggacctcactgccggtgcttttcgtctcggcacgcaaataataaggaggagagccgatgaattcccaaagcatggtcgaacttctgaaccggctcctggatgcggaactcatggccgtggaatactacgctatacacgccgatgccatagccaagccggaaatcgccgaaggtgtgaaggcaatccttcccgcagaacagaatcatgcggcaagtctggcggcacggatcaaggagcttggcggagcgcccggccggcctggtgggaaggcttcaacaaaaggtcgggaaatgggcgaaacgagcaagaagaatggaaccctggctatgctgaagcttgaactggccgaagagcaacgggctataaaagcgtacgccgcggcagtggcagatattctgcatgacatggtgactctggagatgctcgaggaacaactgttcgacgaaatgcgccactctaaatggctcaaacagagaataatggagctggaagaaaagccagctaacaactgaaaggatcgacgaccgatagacctctgactggaccccaatcctctacgaaccttgtcacaagtgtcaagctgccagtagacgtgcgttacgtgatgacggcatcatttgtatcctattcccttgaaaaacgagtagcagaaggtcccgtccggctctgccgttcgatagagatcccgaatccctgtagcccaggacatttcgtctatcaacccttcacggactgcttgcttgccgaccccttcaaccatcgcagtgaacgtcttcttggtgaagccatccactagggcaggcctgcttccgtccacatagaccatacgcggagaaacccgcacgtcgcgcaaaccggcctccacgagcagcgggtacaagcgacgtccaatgagggagtcgccgcctgctcgagcttgcagatctaccaggcactggatagccttgcgagcgtggacgctgtcgggatggaagtacgcggaaccgtggtccccttcgataacggttatcgatccgccgggtttcaagacccactgcagatggctcaacgcccctttcgggtctgacagatgctccagaacgaaacagacaaacacgtggtcgaaatgttgcggggcaaatgggagactgaagatgtcagcacgctggaacgtgacgttgcgaagacccgctgcgtgaacccgctcactcgcctgagccaacgagtcctcggacagatccaccgagacgaactccgcttcgggactgccggctgccagggttatcgtttgggctccgacaccgcagcccgcttcaagaataatggttcccgcgggatatgcggtatccgaatgcaacaatgccgtcaaggtggtcgcttgatcaaagaggcgtacactctcggtttctgaatacccgtgcacgtaatcagtggtcatctcttctcctgtcatgtgagccggagatcagatatgagccgaaattaccgtaacctcgcttccatttcaagacccgacctcactgcactctgcgaaggggcttggcacagagcggaagatctgataatgcagtaatcctgagattagggttcgaggctcctataagtgttttttcgcaacatcagtgaggtgtccatggtggcggcccacatcctagtatacgcttttgtggcagtgctcgcgttattcctgtctgcgggccgtgtggactggatgatgggatggatctatgtcgggtccaataccgctgccgtgattgccggtgcggctcttgtagcgcgcaaaagccctgatttacttgtggagcgctccacccatcataaggacgcgaaaagctgggacaagctgctttcgccgttcatagcgctccctggcccggcgcttatctggataacggccggtttagaccagcgtttccagtggtctcgcgcggtttctctccacgttcagatagcggctctcgcgctaatgctgatcggcgttgctctggttatctgggcaatggttgccaaccggtttttttcaactgtagtgcgaatccagcacgaccgcgggcatgctgt

SEQ ID NO: 114 - DNA, 11884 bp, Planctomycetaceae bacterium
ctccttggccgcgacgaggtactcctgctgctcgggcgtgaggtccgtctgtagggccagttcggtcatggcgatgactgcgttcaggggggtgcgggcctcgtggctcatgttggccaggttcgcggagaatgtgcccatgccccataccctggccatcgacttcggcgtgcggaacattggcctggcgctggtcgagcaccatgccgaacagggcgtaaccaaccgcgtgcgttacgccgcaacggtggtggtcgatgcgatttggctaggcaaggccgtgaaaggtcggccggaggcccgccgtattcggcgaacgcgcaagacgcaccgccggcgaatggagcggttggcccaggcactccacggtatgcccggcgatgagcacatcgtgcgtttctgccgccggcgcgggtacgcctacgatccgcccgaggaactcgacgacgcggccgagtcgttccacatcccgcgcgaacggttcttcgccgcgctggccgaagaaatcaagcgatgcgtcccggcggaacatcgccatgccatgctcgccgcgtgccgcaggcatctcaacgcctcccggcgtcgcgaggcggaactgcggcctgcccgcttcgagaatcgcaaccgggtcaagtgccgctgggcgggctgtagccggaacgttccgcgggcggggaacgactatcgcggccggttgcagcaggcgttgtacgtgtggctgaagcccatcttcgaccggtcggaacagcccgccaccctgcgtcgctcggtggaccattggattgccgaattggacggcctggcccgttggcgggcggccgcggaacagctcgacgacgacgcccgcaaagagcaaaccaggcggcgaacccgcgtttacaggaatctgctcgcgcggatcgaccgggaaatgcccgatgacgtggccgagcgtttccgggaggcgtgggcaaccacctaccgcggcaatttgaacgacatcgttacggggaagcaaggcggccgatgcacctattgccgcaagcactcggaccagttcgtcgacgacttcctggccggccgccccatcccgcatggcgaggaggtgactgaacgcgacctgatcagccgaaagcagcaactcatcttcagccgcttgtggcggctaatcgaggcccggcttcttcccctggccggcgggcggatcgaccgcgtcgtggtcgagcgcgtggcgttcgacgtgctggccgggcgccgcaagaaccggcagaagcttggggaggagtcggcagcggagatgtactggtacggcccgcagtatggttttccgtcgcgtctggacatgctcaaggccgagttcgacggcaagtgcgcgtactgcgacaatccgcttgcagaagaagtggagcacctgttgccccaaagcgagttcccgctgaactcgtacttcaacgtgttgcccgcgtgccgggaatgtaaccggaagaagggcgcccgccccgcctcggcggcccgcctgacggtaacgcccgaggcggttgcggcttactcgaaatatatcgccgggctccgcgtgcctcacctcttccacacgatcaagaagggcatgttgaccctcttgagccgcggcggcgacttagccgtggcggaacggcaactcgggctgatcgccaacaacctggtgaccattaccaacacgcagcgcggcccacgcccgttggcccgctatctggccacgaagcttgggcgggcgacgggacaccggccggaggtaggtttcacggccggccgccacacggccctgtaccgcgagatgctgctacccgattacgacaagccggcggctcgcgacgagggcgacctcgtgaaccatgccgtcgacgcgattgtactcgggtgccggttgccggcggccaccgtactggaaggtcagaagtggttccagacgccgggtggaatccggacgtggcgaagcgatgtctctcgggcgggacccgagcttgccggcgacgtgcctcgggtggaaggcccggaaccaatcgcgtacttcgaggacgacctcggggccggctatttccgcatcgacatgagcgcattcaactggaaccagaagcggaagtccggccaccggatggacccgattggtatgacaagggccggccgcccgattgaccgcgaaccgacggcggaggtgctcaagcatttgcagaaggcggcctcgcgaccgggcatgatcacgaggattgcgcatcccgccttacgcaaggcgctcgaggcggcgccggaccgcgcggcggaaacattcatcgcctggctgcaacagaccaccgaggccggcttgaacgccaatgctatggggcggcacccggccgaccagcagcgccaggcggtcttacggcagttcacgtccacgcccgtcgaacacttccttggcgacgacgcgacggccgacgtgccggggattgtgggcgttcgctgcctgaagaacacttccgccagtgtattcgatgtgccccgctccgacgcggccgggcgcgtgttccagcattacaaaggcgacccgcgcatcagccgcatttacgtgggctaccggcaccgcaatgggcaactcgatcgttcccggccggtggtgtactgcgtgaaccaggtccacgccgtctggcagcgcaccgtggggcgcgatatcgaccttgaccatccgccgggcagccccctgcgcggccgcccgctgggctcgacggaggagccggaaaaggcgttcctcgcgcattggcacgccgcccttgaccgcttgtgtgcgcaagcgggaatcgtcaagcggtttgtgctataccaaggctgcgtgctcgaaaaggccgacggcacccacttccagttgcgcaatttcgacaagagtcagccgtggatcaacgccaacacgttccgccatatccgccgggtctatcgttcgccattacgctttgcagcggaggacggcgcagggcgagacgtatgaagggtcgagtgaatggtctggggcgccgagaccgaaccagtgaaacagcgaatcgagcataaaatggcacggttgcggcaacggggaactcggttgcggccggcgggggagtagacaagcgagtgaggcgaacacaactgcacgcgagttcgctggcttgcccctgaatggcgcccggccgctcctacgaagtaaagcacaactggggtctgccgcacgaaggtttgcagcgcgtagcgcgcacggcccgggaatcgtccaatcggcgcgggtcgatcaggcacaccgtggcgcccacctcaacgcagtcggcaagccgttcactccgcagcacgtcgagcatgcgccacggatgccccagcccggttgtctcgatgagtagccgctctgggcgctcgtgtcgcacgacctggtcgacagcggcatccatcggcacgtcggcgctgcaacaaaggcagccgccggccacctggcgaatcaccacgccctgctcgggcattcactactcaacttgtccgaccggcaaacttgttgtatgctgcgtgcgtgccgatccagtaccagatattgatatcaccgtcttttacatacagcgcgcgatactgcatcgtaataccgacggaccaagtgcccggcttgtgactccctgtcttgcagtccttcaactggtggtggcgcagtgaacgaagttgaggatcggtatggaaccgcaaagcgacttttcgcgtcaactcctgcacgtcccggggaagccgcttgtactgttcgcggtacccactggtcgttcgattctgctgcctaaatgaactcggcagtctgtccatggcgggagtcttccagcgcttcatcccgcaaagcgacgaaggattgaggtaattcgtcaacagtctcgaacgcgtcgactatggcccgcgcctcctcgtagcaattctcgaactccccaagattctcgagatcgtagccgcgctgctgctggcggcgaaccgagttgtgtgcgtcgcgacacgcctcaagccaccgacgaaataggttgcgaagctcttcgtcggtagcctctgagtgctcgacttcgcccgacaaaacggcgcgtcgagtgcgcctgtcaagcctgatcagccagtggaatgcgtcgattcctaactgcaggaagtcctcgcactcgtagcactccatggcctcgtggtgttcgcgcatgacctcttcgtgccgatggaactcgttcacacggtcgcgaacaatgtcatcaagtcccatatcgaaacccctggcaggatggacgttgcgtagagtaccacttccgatgcggtgcatcaataccatttattcggccggtatccgtccccagggccatctctttatatcatgggccgaaaagcctgcggggtcaatgacctaccacaagaaacttatcgccccctgcgttcgggggccgttccagccgccgtgcgcctaccctttgactgacgctcatttggggggaaggggattcgttgcgtcctggcgtggtttctcctaagccgggttaatccacgacggggtgtcgcccccttaagtgactatggtgtatgctcttacgaacaatcgacccattgccaaaccaccatcttgcgggccggtgcggtaaataccgcagggtcacgctttaaaagttaaatctcgccagcgccgcgtttggattcgggcctggcgatggccgccgccaggcgatcgactacaccggccacgtcgtactccccttcgcggatcttccgccgtattgtgctcaccgaggtcgacgagaagcagacgcccggtttcgcgaagtgcccaaagagcagcctgcgccgggtgtccaccggagcgatacaaaagatagatcgcctcggtgaagcaaggccaggtcgtctccaacggcccactgggaaggactttcgccgccgcggcgccgcttccgtgatttgggtcgttgcggttgatgagcgccaccagcgggcctgtgtcggtgagaatcacaacggcccccgctgatgcccttcaagcaatgcttcggtgaaccgatggccgcaatcctccgagaacggttcgctcgcgccatcgaccgtgccaatgtgcccggccaagaagtcaaacagcgtttctccaggggacgcgttcggcgcctccgccacggcaaacgtgcgccgcaaactgtcgaggatctaacaaaggggacattactgattttcgggcgtcttgcgtggtcggccgggcccgcgcagggtgaattcgaggccaagtcgcgtggcgatcggatgcgtccaggagtcggtgcccaggggacgaccgcgttcgatgctccttcggatggcttggagcttctccgcggggagatcgtggttgacctgtgcgagccagttgcgcggacgcgagaccggccaggggctaaggtgggacaagtcgtgcgagtcccgccaacgaatgtgcaaggaatggatcatgccggctgatggtgggactcgctccacttggcccaccctacgcgtactcgtcccacgctacgtttggccggcggacaaggcggcgccgcaacccgtctgcggcggatcttcgacattcatcgggccctggcctgattttgggctggacatttgagaaaaacttgttatagtgtgcacgtgtatatgtatcaggcagcggtcgtgctgtgaagggattaggcgcgcggcagatggcaatctaaggaggttagggccatggagggacaatctcaggcttctcgtgacgccgagggcggcgaaatgcaagcgaagaccgggctcgcgatacccgagcctcaaacacacccggcgaccaaggcgagcgcggaggaagcgggcagccatcccctctgggcgctcgacgacgcggcactggacgacgtgcccgacgaggtcaagggggcgatcgacgacgtggtgcggccggcctacttgcgcttcgtcgtcgagacgcacgacccgatcgaacggtcgcttggcatgacgctcgtgcacctgatgtggctggaagtgctccagcaacaccacgcccaaacggaataccgtacgttcaactgcatgctgggactgcccgacggcgggtacgagcaaatgaaccagcagctccgcctcctgcagggtaaagtgcgactcggccagttcctcgtcaaactgcaagaggcacgcgagcggagtgaagcccgacgctcggcggggtcggaccacccacgggaatgcctgcccgctgcaaaaacggaaatggagccggaggacgaaccacaagacgaggacgaggcgcccttcgccgtgaatgccagtattcggccgccgctggacgccgttattgaacgacgggaagcgcgacggcctgaaccagaagagggatgagtgaccagcggcgaaaagcggaaattatggattttgttgaccaacagatcgaacgacgcttccacgcggtgcgggcacaaatcgtttcacggcaggcacttttcgctgtgcaggggtcggttctggccacctggcgaacccgcgatggacgccggttcggcccctactttcgggtatcctatcgcgagtatcgagggagccgggcggtgcagcgcgccatctatttggggcgcagcgagccgttggcccggcgcgtgcgcgagctgctcgaaaagctgcaagagcgccatcgggcccggaagcggcgtgcgaagctactggccgaagcccgcgcggacttcgcccgcgcgaaacgggaactccggcgcacgctggcgcccctgggcgtccaggttaaaggctacgagttgcggggggcggcccgggtggtgcgacggtcattgtccagcgatccgaattgatgaacaactccagcctacgttaccagcaaccagcgatggggcgcgtcgtgtccgggccaggcggcgggcggggttgcggggaagtgagcgccgccggaagcggttgcggaggcgatcgagcatgtggcggccggcgcgggccggtgctggttcaactgccctcgaaccagggtaaggacgtagccaagctcgacgcatttctggaagagttcaaagccgtgacccaccctgcgcggtggaaaatggccgtcgagttccgcaacgccgattggctgtgcccggaaacctaccacgtgctcgaccgccgccgggccgccctttgcctgcacgacatgccgccggccgcggtcgctgaaccgaatgacgccgccttcgtctacatccggcgccatgggccggcgggcgattaccgccactcctattccgaccgcgcccttcgcgaagacgcgcagcgcatccgccgctggctggaagaagggcggatggtgtttgcctacttcaacaacgacgccgaagcctgcgccgtgggcaatgcacggcaactgaaggaggagcttggcgacagcgaatgatgggggaacgccctggctagccaagggggtcacgatgcgaactccccgccgatgccgtaccgtctgatcgaaaaaccatgtttaccaatacgtacctgccccatgtctccggtgtggcccgctcggtggagaccatccgcgacgacctgcgaacgttgggacacgacgtgtacgtggtctgcccgaccttcccgggcgcgacgaaatcgaccgagacggtgctgcgagtacccgctatccagaacttcaacggcagcgacttctcggtgcgcattccgttgcccggcgccatcagcagccatcttcacgagttccatccggatgtcatccacgcgcaccagccctttctgctgggcgatgcggcgatgcggcgttgcgggcggcgcgcgagtgggcccggcccctggttttcacgcatcacaccatgtatgaggactatacgcactacgtgccgggcaatcaggagcgccttcggcagtttgtcatccgcctcagcaccgactacgccaacttctgcgatcatgtgattgccccgagtgaaagcgtcgccgagttgattcgccggcgcggggtcgaatcgacgatcacggtcataccgaccgggatcgacctggccttcttcgccggcggcaatgggcgaacgatacgcgaggaattgggcattcccccgagccgcaaggtgatcggccatctcgggcgcctggcgccggagaagaatctcgattatctggccgaagcgattgccctctacctcggccaggaagccggcgccggaagttgttgcctcatggtgggaggcgggccgtcggaagagccgatcgagaagatctttcaggggcggggcgtagccgatcgcctgtacatggccggccggcgtacggggcaggaactggccgatgcgtatgcagccatggaccttttcgccttcgccagcaagaccgagacgcagggcatggtcttggcggaagcgatggcagccgggaagccggtcatcgcgctggatgcggccggcgcgcgggaagtcgtccattcgtccgaggcgggacgcctccttcacggcgatgccgacgtggaaacctttgcgggcgctctcgcggagtttccccttgcgggagacgcgtaccgcaaacatgtcgatgccgccaccgaacgtgcccgcgtattcagccgccaacactgcagtcgccggctcgccggcgtctatgagcaacttgaccgggaggcgcgccgccagtccgatgacgagcggcacagcgcctgggatgcgttgctcgcccgcgtgcaaaccgaatgggaactactagccgcccgagccagcgccttggtcgccgcagcggaagccaaggaggactcaaaacgcgagagataggagattctccgtcaggttggggtggcccggaagacgtgacgtcgttgcaagcgtcagaaccctaccgcccgcatcagccaaacgaccgccggcaccgtcaccacgctggcgagggtgctgacgaagatggcccgggagagcatgggtcctgacggacaaccgtgcttcggccgggccgacggccggctcagggggccgcatgccgcacgagatccaggaaatccctggggctgagcacggttgtgcctttgcatgccttcttggggaagtgtcggaggtttccggtcaccagcatggcgcccccggcggcggcagcttccaggaagggcaggtccgcagggtcggggagggaggtcgcaggcgggaccgccgccaccggctcggcgatagagcgaatccattcgagcacgatggccgcatcctccggacgaatgccgagttcgcggcggtacagcaccgattcgtactcgtcgagaatcctgtcgtcggcgcacagatcgaacgcgccgtcggccagcaagtcgatgatttgggcgcacgtgccgcccgccgtcatggcggccgagacgatgacgttggtgtcgagcacgatcttcaccgtgccgctcgcctttcgcgccgagccttggcgacgacggcgtcgatctggtccatcgtcaggcggtccaggctgtcggccttggccttcgcccggatgcgtcgcagcgcggcctgggcccgcgctcgccggatggccaagatctcctcttccaccccgtcggggtccactcgagtcatgaccgcaaacggacggccgttggccgtgacgaccacctcgcggtcagcctgaaggtcttggcgaagcctcgccgtgttgctccgcaggtcgcgaatggtgatgaacttcatccgttgtactcccgaggacaatgcacttgaacggtatctttagtgtacgcaataatgcgccgattgtcaaggagcctgcgtcccgttgggtacagccgttcacgggggacggtctcaatggaatcgcgggaagatcgggaacttcgcgtcagaaccctaccgcccgcatcagccaaacgaccgccggcaccgtcaccacgctggcaacagtgctgacgaagatggcgcgggagaccagcggcacgtcgccgccgtatttctccacgacgatcgagcaggttaccgccacaggcatggccgaaatgatcaccacgatggtgagagtgtccggcgccaaccgcaggtttaccaactccgccaacccgacgagcaggaggacggccgccggcaccgcggccagccggacggccgcgatggcgaccacgtgccggttccatgcgtcgcgggctccggcgccggccagcagcgatccggtgacgatcatcgagagcggcaccgtcacctcgccgacgaatgccgccgcctgcacgatgatgctcaaggcggcgagcgacacgccgacctccgtaacgtccagctcttcgagcgtctgcgtccatggaaaggccagggccaccgcaatgcccaggatcgttgccagcaaccccgggttcaaggcgagctttcgcaacgaggctaggtccggcttgcccccacgtacgatccacacgcccgcgctccagaacaccaagagcgcgccgacgttgaagagcaagacggcccgctcaccttccgcaccgtacagggcgatggcgatcggcagtggaatgaacaaccagttgggggagccgatcgtgaaggctaccgagccgcgatggggctcgccatccttattcagcaacggcgagacgaggtagccgatgcctccgcccaatagaagcatgcccgctccaagcactggcaaataccagctttgcgccagcttctgagcgtcgaccgtccgaagcatcgaggtgaataccagcgccgggaatgcgacgtcgaccgcgaagttgctgagcatctccgtcgcgcgcccgtcgagtaacttgaacttgcgcacgaacaggcccgtgacgatcacgaggaacagcatggcaatcgtttcgatgacgcgaacgacttcgtcagtcactggggccgttcctcattccgcgagtttctacaaagggtcgctgtctgggctgcgcaccgtcaccgggcggctgccatgtcgctggggcggggcgtgctccgcgcgggtgtccgccgcttcatggataccaatgaggaactcgttcctgttcgcacaccgcccccttttcacaggggagtccgatacacagtattgtcgagccgctcttaaccggcgacgggcgtttcccggagatcgagcaactcgacctgttcgggccttggccgcagccagtcaagccaggcggccgagccgtcggccagcctgccgggattcacaaccgtggtgccggcgatctgctgcacgccgcggtgctcggtccggccgccgacggcacacaggtcgggatggtagctgtcgatcagttcaccggcaatcgcggctccgtcgcccgcgccgcccatggggccgggaggcggtgccccaagcaggagcaccttgcggggcttttcgaccgcccacaacggccgcagcagatactccgccacgctgcgcgatacccgcaccgagtgttcgccggtatccacccattcggtgagttctcctccgataccgcagatggcaacgtcgcgattcgtagccagggcaccatgtacgaggtgcagtttcgggttctgaacctcggcccccatgccaatgcgcaggaactcccgcacgggcacgtcgtggccggcgggcacgagcgccgtgaaaacgtcgattctcgccatggtttcaaaaaactcggcgtaccactcggcttcctgcggcgtcaagtccttctttcccgtgcccctcgctcgttgctcatccggcttcaggatgccgccgaggaacaagatgccggcggggcggcgttgttgaaccgcctgctccaacagttccagggccttgtgcgatccatccattccaccacagatcagccattgtctcatgatgtctcctccgcgttacgggtcattcgtgggttaggcggtgtaaaacaataaactaccgggaacttcaagcgtgggataggcttccagcctgtcttttccggcgacaggctggaagcctatcccacgcaattcggtaggttattgggtta

SEQ ID NO: 115 - DNA, 17241 bp, Artificial Sequence
  Synthetic
gtccacgacaaggcggactcgacgacggacttgcacccgcgttccatcgcggcgtgactggcaagtgccgctaccctccaaggtcgcgaaaggcatccttggagatgtcggcttgttgtaggtgttggcgcgtcaatgcttggtggcgaatttgctcggattctggcccttcacggtgttcacggagttaacgcagtttcacttactttgtttttacctatcgcagggaaatccgactagtagttggaaacaaagtagggaaaaccgcgttaagcgcgtgaagtccgtgaatgggttcggtgtggaattggacgccagccgtcaccacatccgccgcgtctcgctccgctgggttcaactccgcgccgatcacggccgagccgcacgaccagcggtaaaaaggcaggcaggggaggccgttatagctggaagaagtcgggaagcaatcgtgtgtggcttgccactgccacgccggcgcggtacggtgcccaccgacgagagcaaaccgcgtgaacgcgacagatgacgaccgacgagcggcccaacgacgaacccgacggcatcgacgccggcacgctggagcggttcacccaactcgacgcagaggagcaggcgcggatcatcaagctaacgcgacagccggctcttgatcccaaggtgccgaagcgggatcgcgagatcgctgaagcgcaggcccggcagttggaagccgctcgacgccgcgctagacggtatccgtcggccggctgagacgggtgccagtaattgcacgaagccttgaacgacacaatggaccgtcggttacgaaagagaccctcaacactgaagtcatcgccagcaggctcaatttaatttcatgggttatgaaaatctcgatcgcggaatagaggtgggagattaactgatgctgcgacgaatggaacagttcgacgatgtacggctggcgtttgccactctacgaggctacatcgagcctggaggaaccctgaatctgaccgagatcaatattcatgcggaggatttcgtcggcgaagtcctcaacaggctgtacggttgggctctagtgccaaccaggacaatgagcgccaggtatcccggaatcgatctgctcgaccgtggccaaaagctcgggattcaagtgactgctgaggggggagtcgacaagataaatgacacccttcgcaagctggcgacgagtggtggggcagtggagatcaatcagctcaaaatattcgcgctccttggaaaacaggggtcgtatgctgttcgggatgcgtgtccgggcatcgcgttcacgtggaaaaaggatgtggtcgatttcaagagcactcttgctgacgtcctcaatgcaactgaaccgaagcttacggcaatacatgaatacgtgacgagcgaactcccggctgtttttgcaagccgacgcgaaaaatatgaacagatccgcgatcaattgaaagagaatctgatcgttttcgatcgcgacgtcatgcgggtcgccgatcggtatgaagacccagtgctgatgtgtcgagcgatccgatacatgcgaacgaccctccagaaatcaggtgccgcgcgcatcgcaaatgaggtggcggcaaagcagtttgatgtggcgcaaaaagttcttggtgaaaccgaacgagcgataaaggttcggtttccatatatccacaaggcggctctggagttaccggagcagcaatcccttcctttcgacgcatataagaacgacgactatggcgaatcgattcgcacaatgatggagatgcggccgaagctatcaaccagcctgcaagcattagaggacgaattgcggagaatcgaagaggtgttgtaacattctcgccgagagcgcgctgtaatcccgatcgcacctgcgcgcgttggtcacatcgaccagtgcattggagttgcaaagccatggcccatgctgcccaggatgcgtttcatcgccaccgcccccggtcccgagacgcataaaagccttataacatactcttgactgcacgatcaagagtatgatataatgcctccgttggggtaggaggaggaaagacatgaagaaaatcatcgcgtactaccgcgtatcgacgaagcggcaggggcaaagcggactcggcctggaggctcagcaggcggccgtggaagcctacgctcgccagcatggggccaagatcgtcggcaactataccgagatcgaaagcggcaagcgcgccgaccggccgagactcgctgacgccgttgggcacgcgaagctcgcgggcgccacgttggtagtggcaaagctcgaccggctcgcccgcaacgtggcgtttctctcggccatgatggaggcaaaggtagatttcgtcgccgtcgataacccggcggcgaacaagctgaccttgcacattctggccgccgtggcggaagccgaagccgaagcgatcagcgcgcggacaaaagccgctctttccgcatacaaggcccgtggtggccggcttggcgcatcgttgccccagtgccgcaacttgacgcacgaagctcgccagcgcggcgcgaaggccgccggcgaatcggtcaaggcaaaggccgacgacgcctacacattcctctatcccacgattcggcaacttcggactgatggcctgaccttccaggccgtggccgatcggttgaacgccgctgggcactcgacgcggcgcggatcgacctggacggctacggctgccatgcgagtctgccggcgagccggggccgcgtagcaaccgtggtcggcgccgcccaaggcggtcagcgctggcatcgtgtcggacggaaggccgcgaacccggcggtttgcggcggacgaaacgcggtagcctagcaactttcggcgagcgttgtcaaaggagccgaaaatcgggtagtggtgccccaggtgcgttgctgattttttggccgggtaggcgtgcctagttcttgggcagaagcaagtcaggcaaatattgcagtcacggcggtcaagatcgccatctgcaatatccacataaccaccagcagcaagcaccatccccccatcaaaggcattcgcggatagcagcgattgatgtcaaggaacgcgcaccacaccaggaaaaacccaatcgcggccggtagaagtatcgccgatggttgcgccaaatagacatttcttatccctgccacaaatgcagtccccgcgaatccgagaacgaacgagcgggcgtgccaattgccgcgattcgccatccccggcgacttgtacgggttctcgtccatgctcccattctaccggggctgccttgtgaggaggaagtggcgggcggtggcggcaagtgggctaatgctgtggtggtcggtcgtcgccgacgaaacgcggtagcgtagcaactttcggcgagcgttctcaaaggagccgaaaacggggtagtgggtcgtattgaattcgggattttttacgccgacggcaagccgccgtggtagaaaggggtgcgcgttatccaaactggcgcaggtccatacccgatcagaaccgcaaattcgctgcccattccgtcgccgcgcaattcggcaacaatcacgtcggccgtattcccgtcgttcataaccaagcgacagaggcccggttggaggattgatccccacgacagaattgccattcctccccaccaattgccatcggtgtcgagatttagccgtgtgatctcgacttcgcgctgattgcctatcagcctgccgactacaggatcatcaagtcgagacatcgcacgaccaatgggtggtgggggaacggctgcgttgctggcgaagacgggccggatgcctaatcggtcggcggcggtgccttaatcttggcagaatcgtgccgtttgctgaagtgatcggtaaaacagtttatcgtccagagaatcaggagcagcgtggcgttaattgcgacaaaatacagcgtgaaaaggacgccaagagcgaattgcccaaccccgactttcgctgcgatggcggacagcacggccacgattgccgtgaggatgaacagcgagcgcaagcggaattgtgggcggggcattatggttcgcccggcgccggaacgccggtctggtcggagtccatcgttagaaccgatcgctcgccggtcaccaccgcatcccaaacctcccgcgtaataacgccggtttcaacggccttgtcccaggcggtgctcaagcgacgtttttcaaggcgtcgttcaagtcccatccccccgaagaagcacgcggcgccgaaaatcagccagagcagcgtcgaaaggcggaactgaaagcgggggcggcgcatgggggtattctaccacccgccagcttcagcggaccagccaggatcgcgctcttgcccgccgcccgcgccatgccgctgaattgtagcggcggcttcgttccaggcacggccgccataattcttacagcgagaattatctgatggcctttcgctaactgccgagcgcaaatccctgccggacgtggtcattgcgggttggcctgtcgccgttcaacgggcgttgatgcccgaaccgtgggcgattcaatcgcgtccttttctgcgcagagatgatcgagacgatcgctagcgcgttgcatccgcacgctcgtgcgccttcttggcggcgttaaactgcgcttcgagtttcgcatccatttcttcctggaatttcacagacttggcatgttccttctcgtggtcggcgaaaatcttggctgttcgttctctaaaatgcttggattttgggtctagccaccctttgccgagcgcctcttcgtaggctgcctggagcgttaccatgtcttcgcggtgttgctctgtttcttccttcatgcggtcgtaaacctgacgttcggcgttgtaaagctcgaccgcttctttgtgcttgtgctctttggactcgcagccggcgagaggcaaaacggaaagtagggcgaacatgagagcaagttttcgtagcagcattggcaattcctccgatggtaagaacaagcagccgccgcaattccgagccaccgacgttcgggccgattgcgtcatggccccggatcgctcggcgtactggagcgcgctggcgtggaagtcgaagcggtgcccgctcgacccgccgaagtggtcctggccttggcgatgaagacgacaggcaagacggtgactgccgagtcgatgactgcgcccagcaccagagcgccagcgcttacgtgaaacccgttcaagtggatggcgatggcgttagcacacgtccagaacgccatgctgaacacgaaggcgatcgcgacctgcgcccgtaacgaaaacggcagtcgcaggatgccgagtccgaaggctactgccagtgcggaagtcatcgccgataccatgccgtttacgatgagttggtcgtcgctgtcggacggcgatacaaggccgatcggaacggcaatcaaggctgttccaaagagccagcacagcaaggccgcgttggcgggggagacgctgttgtctggcggcggcctcaaggcgtcgatcgacagcttgacgccgcaaccgcacttcgggcaggacttggccgcgttgctgactggctggccgcaatcgcggcacttgatgagcattgatcgttctccctattttgtagacaattcatccttgcgcttttttgccgcatcaaccactttttgctggtcggccatctcgcgttcaatggccgccaagcgaccgtcaaaatccttggccgccttagcaacggaggcttcaatcgcaaggctttcaagagctttcacggcgttctctggcttgccatcgttctcgatttcgctcttgatgttgtccgcgatctcatcgacgcgaaatccttcaaggttggcaccattgtcggcacacttcttgatgagatttgcaaccttcgacttgatctcggcaatgcgattgtcctccggtcggcgagcttcttgcgcttccatatctatcttgtcgcattcgttctcggcgagctttagggcagccgtcgctttctcttgatcttcgagaatttccgtctttctgctgggatcgaagtattctccgactgcctctttgtattccagtttcttcaggcgcagactcaactctcctgccgtggtaaggagacgctttcgctcacgcatgtacttcgacttccgaccttcaatgtcttgaacgcgctgcatcgtgtcggctttgagacttagaatatccgcgctaaggcggtagccggcggcggtcgcgaccgagcgggcgacttccttcgcttccttcatctcgcggacacatgcgtcgtgctttttcgcgatcacagccaggccttcagactcggcgttgtacaagtccagcgcgtccttgtacgacgggcctctcgtgaaagcaaatcccgccagcaggacgagcatcacgcttgcaaggcaaacaccgatcaaggcgggccacttggaacgcatcaacggcatcgtcgcgcgcaccggagcggttgcgagtggaactgtcggcaattgtggaattcttacagggaccgcgacaggtgcgacggcatggacggaagccgcgattggcggcggcgatcggccgatcaccaccggcgcggattgaggggccaagtggtcgaacagccccgtgacctgggatgcgtcaacccaacgaccatcgttccctttgcggacgagatcgctcggcaatagctttcggtcacgaaccattcgacgtaattcgttcgggctaagcggaccaaccacgtcgcccatgagttgggcataccattcgctcgtcatcggcgtaccctttcccttgtcagttatcgcattcgatatggcatcgactccgtgttcggaatcgaacgactcgaatcccacgacgcgggttggtctggtagcgatgggcgcgcgaaaaaaggagcgccgaaccaaggccactcctcacacggccgccaagccgtcacaagaacagcgcatggccgacgctcccttgcgagaagggagcgtagccagcactgcttcttgtgatttcaagagcctctcggcccaagttggcggttcgtgaggaagcaggaccgacgtatctcacgtcgttcaaattgtcgcgtggctgggtgggccaccaggttttcccgaaaaactactccggaacagaattggttaatcgtaagcggtgctcaacccgatttgcaactgccgccggcgggtttttgggcctttggtctggtcgcccggcggtggcgtgccgtggaggagtcggccacggactggagggatggacgacctagcaaacccagccaccggcagcgcgatccggccgagatcgctcgcaagcagacagttcggtgacctggcccgatcgcaggccgagaatcgtcaccttgccgatcgcagtggtcatcgcgtgccgtggaggagtcggccgtcacagcacctggcggcgcgcccggcacgtcgattgggaggttcgtcgtaatccacgccaagccagtcatcagcgttcgacctgcaacgacgtggccggaagccgcgatcgttcatgctgaacgattcccaaacgagaggccgcgatctgctcgccacgtcttgatcgaaaaaatgattgacaatgagcttggcccctgtatcgtgggggcgtggccgggaagtctcggcggctctttggcaattcaaacgaattcgtgtggtgtctgaaaagagccacgtccaggagtccggcacccgtggattggacagtctacggccctgcacggccggtatagagaagccggccaaacggccctggccaatgtggtgagtccatttttatgtttgttgatccggaagcggagtttcaggcgacacgaacttttccaacggcctgcatcactccagtcggcagatgctccgcaagccgtcgatggtttcaggcgacacgaacttttccaatggcctgcatccggcactccccccaggcctttctaacggcctgcatccctgggaggacttgcgcggcgaatccctccgatcccacagtttcaggcgacacgaacttttccaacggccttcatcatcgcatcttgcccgtctactccgcaccagccggtttcaggcgacacgaacttttccaactgcctgcatcaactgggcaatccgttcgcgtgcggtcgccaactcgtttcaggcgacacgaacttttccaacggcctgcatcatccatgcgcggcgcaactcgggcatgtcgccacgtttcaggcgacacgaacttttccaacggcctgcatccaactcgaatcactccccgctgtactcgatgaggtgtttcaggcgacacgaacttttccaacggcctgcatcggctgggaacccatgtattgtttagtccccagaagtttcaggcgacacgaacttttccaacggcctgcatcccaccccttcgcccgttcctcccttcgtgccgccgtttcaggcgacacgaacttttccaacggcctgcatcgcttcggttcctggatctggactacttcgatgatgtttcaggcgacacgaacttttccaacggcctgcatcagcactcggcaagctgcgatggaagaagaccaccaagtttcaggcgacacgaacttttccaacggcctgcatcctcaaccgtgcccgagcctcaacccgaagaagtgccgtttcaggcgacacgaacttttccaacggcctgcatcgagatcgccaaccaggtcaccggtgccgcggccatgtttcaggcgacacgaacttttccaacggcctgcatctcgacgtgtttgcggcacatatcgacgcactgacgtttcaggcgacacgaacttttccaacggcctgcatcacataagcctgcgccttgtcgaaatgcgaatcaagtttcaggcgacacgaacttttccaacggcctgcatcttgagcctttgagcctttgagcggtgaattagctgtttcaggcgacacgaacttttccaacggcctgcatccctactattacgaagtcacagcgatcaacaacaacgtttcaggcgacacgaacttttccaacggcctgcatcggccgccgttggcgcattcggacaggtcgggcgaagtttcaggcgacacgaacttttccaacggcctgcatccccgagaggtactggccgttcgtcaatcagcacggagtttcaggcgacacgaacttttccaacggcctgcatcttggaaacccagggtcaagggtagcatcctggatgtttcaggcgacacgaacttttccaacggcctgcatcccgggtggagttcgctcgccggctgggggtcagcagtttcaggcgacacgaacttttccaacggcctgcatcccattggacccaatcgggttggtgagtgcggccgttgtttcaggcgacacgaacttttccaacggcctgcatcgtaaaggtagtacgccatgcggcggcacgtgcgggtttcaggcgacacgaacttttccaacggcctgcatcccgccggaagagccaccggcgccaaagcccgacaagtttcaggcgacacgaacttttccaacggcctgcatccaagatcaacgcggacgtcacgcagaatttcgacgagtttcaggcgacacgaacttttccaacggcctgcatcgctgcaacgtgccggcctggccgttcgtgatcgtgtttcaggcgacacgaacttttccaacggcctgcatcccaccggcgccaatcaatccggctgtgtcgacgtgtttcaggcgacacgaacttttccaacggcctgcatcgaggcgcacgcgccgcatggcggaccgtggccgggtttcaggcgacacgaacttttccaacggcctgcatcggcgggtttttaagtcgaagtgcgctcactacttgcgagtgcgaaatcgcgaaccccacggataccacttgcgatcggatgtaggatgactttggctcggctcataaatactgggcggttctgcttttacgacgatcgcgaaccccaccgtgttttgcacgtcactcctggttcgcggaatatcgaaggtcgcttccatgactcatacgctttcgattgacttcggttcgacgtatatcggcctatcgctgttggcgcacaacagcgccgacccgaacaaggtcttgtacgcagcgacggtcgtcgccgatcccgcctggcttaccaaaacggttgaaccgcgcggccagattcgccgaatgcgccgcactcgaaaaacccaccgacgccggttgcaccggttggcgcaagcgatggccggcatccagggcgcaacgcaagttctgagtttctgccggcgtcgcggttacagccacgacagtgacgatgatgaccaggatacggcggcgttccgagtgccgcgtgccgccttttttcgagcgttactggcggaagtcgagcgctgcgtgccagcggctgatcgcgagcgggtgcgcgcggcgtgttcgcggcacctcaatgagcagcgtactcctggcgcggaacttcggccggcgcgattcgacaaccgtggttcgtccaggtgccaatgggccggctgcaatcacaacgtgccaagagccgaaaactgtgcccaagaaaagctttcgcaggcactattcgcgtggctcaagccggttttcgatggctccgccgatccaattcgcttgcgccgttctatagaccattggattggcgagctagctggtctttcacgggcataccgccgcgcggccaagctggaggacgaatcgaaacgcgacgaaaacgagtctggcattaagcgtcgcgtcaagcgcgtgtacaagaatctcaaggagcgggtttgtcgagaagccacaccggaagtggccgagtcattttctgaatcatggaatgagttttatcagaagaacctctccgagatcgtgtacggcaagcgcggtgggcgcgccaaatactgccgagagcattcccagcagttcgtcgaaatgtttctcgctgggcaacagattccgaatcggcaagacctcagcgaccgcgatctcgcttcgctgaagcagcaaatcatctttcggcgtctgtggcggctacttgaaaaccgggtgctacctttggctggaggtacgatcgaccgcctaatcgtagagcgcgtcgcgatcgacacgctcggcgggttgttcaaggatcggcagcaaatctccgacaagaaggctggcccgctctactggtacgggccgcaatatcgcttcaatagccgcctggagatgctcaaggaggagtttgatggccgatgcgcctactgtgggcaggcggcaaacttggtggacgttgagcacatcctgccacacagcgcattccccttcgactcgtacctgaatgtcgtgcccgcgtgcgacgattgcaatcgtcggaagggtgctaggacgccgctccaagccggaatgaccatcaatgagaatgccttcgacgcctacgtcaactacgtgcgccgtcagaaaccaccccatcggctccacgaaatcaagaaaggaatgctcaagctgctgctccgacctggccaagacgggcagccggaacggatgctggggatgatcgcgaacaacctggtccaggtaacaaacacacagcgcggtccgcgcccgcttgcgcgatatctggcgtcgaagcttgaaacagctactgggaaccggcctgcaatcgccttcgtcagcgggcgacacacggcgctctaccgtcgcgtggtcttgccggaatacgacaagcctgccgaaaaagaatccggcgacgttcgcaaccacgccgttgatgccatcttgttgggttgccaatttccgtcggcagcggccctggaaaaccagacgtggtatcgcacgaccgccgacgtggtgacgtggtgcaacaaagtccgcgctgtgtccccaccgctcgatgatggtgtgccagaggtagccaggcacgacctggttcccttttttgaaaccgaccttggcggtggctacatcggcatcgacctgagtgctttcaactggaaccacggccgacgcggtacccatgatctggacccgtttgccatcacacgctccgggaagccggcgaagcgtgtgccggcggcgaaagtgctggcagaactactgttggatgccggcagacgagacaagcagatcgcgggcattgccaaccgtggcttgcgaaacttattggaagccgcaccgcaaaacgccccaatggcgtttgtcacgtggctacaacaaacgacacgcgatgggttggccgacggcacgatgggtaaccatccagcggatcaagctcgtcgtcagcaattggaaaaattcgtcgccgcgaccgtggaaaacgtgatcgctgacgatgagccgataccggccgtcgtcggagttcgctgcatcagcaacatttctgccggactggtggaagtgccgcgctgtgaccgatctgggagagtccaccaacactacaaggccaatccacccgttagggagttctacgtcggctaccgctcaaaggatggcgcgattgacggcagtcggccgatcgtattctccgtgaaccaagtgtacctggttcggcgcgaagaaggtgggaagaaggtcgggttggatttaccgccgggcagcccgctcctgggccggccgctcggagcgcagggtcggctgcgtgacttccttgtggcgtggcggagtgcatttgacgagctgtgtcgggcggagggtatcagccgccgttttcgagtcacgcaaggttgtgtgatcgagaaggtggacggctcgctgtttcaactgcgcaactttgacaagagtgaaccgtggaggaaggcggcgtcgttccgcaacatacaccggattcaccgctcgcctttaactgcgaccgatccctaagctcgcgagacgctccgggtgggccgattccgactaatggcagccggcggcaaagcaatcgtgccatgcccaggacgccgaattgccggctacgcgattccctttccggccacggcctcttggtaggccgccggaacgtgcggcagtatccggctttcgggcaggccaagatcagtgccaaccatcggtagctcgccggcttcgtcgatggcctcccactccttttccattcgaaacgcatccacgtcggtgggtgcttcgggaagcggcatcttatcgagacccgcgaacttgagaatcgccgccgctgctcgaacgtcacctttacgcgcggcggcgaccaaggtgttgattgccgtcggcagcgccgcacgcaaccgctcgttggccgcgcgaaaaagctcgtcgcgccgtacccgaacggcagcgagaaagcggccatcatttagccgccacttcgtcaccgtcactcgatgcacgccaatggcttccgccacttccctatcgttgttaccggcgacgagcaggtccacggcgacgcattgttcgatggttagcccgtgtagccgcttgtagccgtttgtagccgcctgaaccataagttgccgcctttcgtcaccagccggaggggtgccccgttaccgatcgtgctgcgtccgccggttcgccggcgatcacgcgaaggcagatagagtctaacgcatctccagtagggcgcgaattagcggacgccgtttcgggaagcgggagatcgacgacttcgtggaaggaaggctcgcacacagtcccgattgtcccaccgcgcgaactacgatgcggcaatggaaaggccgttcgggcagcaactcccgaacggccaaattccaaaaaccctggattatccaggggcggttcaatcaacggcgacaactccgttgtgaacctggtcatccacgaaggtagattcgcgaatgcctaatcaccattctaatgccggcaatcgcctgctgcgagtcccatccttcgtggccactcggctagcagtccgcgagagacgcttcggggtgctcgtggacgtcgtgcgtttgcccgaagcgaccacaaatcgggagaatacagctacgggtcgcctttgcgaacagatcagccttgcgtgttgcggagccgcgaaatgcggtatccagcggcatcccggaagggtaatccgcgagtgaatcttgcccaagggcgagaaaccgcacgaacgctgaccaagggacggtaaacccaaggccaagatttgtgagtcagtggcgacgtgcctgggcgcaagcgattgcgccggccccgcatcagacagtacagtaagtgtcgtcgcgaattttacgaaactaaggggagggtggtcgggggtagggtgacgcgcgtgcgactttgattcaaatgacctacattcacgacgcaatccggccgtgcagacaatggcgcacaaccatcgcggcgacgttgaatggttcaacagcgccacccaggtcgcgaaggcatcccttgagtgcggttggccttcgtgggcgtgttggttaggtcagggtgtgttagccagcgctggtgtgtcctggccaggacggattgcactggtaagaacgtggtgaacgagttagcggccggggcggcaactatcgctggcctagcgatgaagcttcaacggcggacaccacaccagcgcgctcggccagcagcgttgtccggcaccaacctggctcaccaggatcacggcttacgcgggttcagcgccgagatcgacttggacaacgctagccggtggcctacggcttggggaccacgccagcgaaccgcgaatgacgggcgctggggattccacagacgggccgccttgccggccggcgaattgcttgacgcgaactggctgccgtcgccgaaattgctgggcaggtactcagggaagcgtcgattcgcggtggtggcaaggtcgcgatttcggcggtttgccgcgagcgtggtcaaaggagccgatgcctagtctttgggcggcgctgcctgatctggggcggtggtgctcgaatcttgttgtccagagcggcccttgatcttcgagccgttccatcgccgacctctgattcggttgtagcgttcccagttatcaaccgtcgcaaaagtgagaagcgtgagggacgccactacggcgctgaccagcatgatccagatcagggtgttcaaccagaattgaaagctgtggcggcgcatggcggtattgtagcgggaacgccggtcccgtggatcatcaacttgggtggccggttcgtgcggcgggctacccggctgggtcaggttgcccggctcgccaggatcgcgtctgaagctggttcggcgctgggatcgacctatttcttgatttttccagaaacgtttgcgatggcgtcggcggtacttttccgcttggcagcctgattgtgcttgtgaagatgttcatccaaaatcaattccattccattcttgaccacttcaaaatagtcaagacattcctgctcacttagttcatggatacccgtactgaggattccataaatcctacgattctcgacgagaaaggcaggaagttcatccttaagaaagagaatcttctcctccatccgtagctgtttctcaaattcggtttgatcccagcctggcttttgcgccgcggcgatccgtgcttcttcgatcaatttttcaaaaattcgccgcaagtagacaaacgagccgatcccgacgccgtgtgctcgcaagccaatcgccttgctaaattctcgttgctgttcatcgcccagtacctttttgtatttcttgattccatacagttgaaggtaggcgagacttggaaattgcccgattttttgtaatgtaacgcctcttaatccttgcgaagttccaggagcgaagcgaattgcgaaccacaatgtatggccgaaatctcgactacagtggtaaacaattatcttgtcgcgatctcgttgtacgtaatctgagagctgttggcgatagtacgaattacctatcaaaaggtttgcagtcgaagcattcgcaacgtcgtcgcctgacgcgaattctccggtcccgttaatgagggtaggcatgtctttgcggttcgtcagaaaaacggacgcgctcccacatttgggacagtaggagtcaagcgtgccgttgtaaaactcgattcggatgaagtcgcgccaggcagcgccatcgtcgtcatcccaaccttcgcgcatttcggcgctgagaatctgatacggcgctacctccaagaagaattcgcgcggcgtgggaattgaatttggttctttcgccattcgagaaaggactcccctgttacccggaatggaattccggattgtggacgtgggattacttgagcgcgagcacgacgttgttaacgagatcgagaatgaattcctctgtggtgtgttggttgatgcaaacgccgttcggatgggccgctatgttccgccgatcgagtttttcctttaggagtttgtgaaccgatactgaaattatcccggccgagcggcagacttgaagaacttcgtagtccttcaattccgcgaagtcgtctttcgtagagactgacgcgatgcgagcctttgggtaactcgtcgggagttgcaagttgaatttcgacaggtacgtgccatgcacgacggtacagacatgatcgaaggccagattccaggccatgacgatcgcggcgcgaaaggcgccgtgtttgaagcagatcaaggcttcgtcgagataggcgcggtcgtgttcctgggtgagcttggcaggtaattcggccaacaggttttgcacagcgatcgtcgttgggcgcttgctgtaggtggcgtctaatttagaaagtgtggttcgcgcaaggcagcagttgcctgacggcgagcgcagaagcaggttgttctggcacaactcggcgaagacgctgccgaaattcgccgggcgcggtagcctgactcgatcgaacctgtcgataatttgtgcttcggtgtaattgggtcgcttttcctgtcgatccatgaaccatgcaatggcaaggatttgttggctaatgccgaaaagttcaaacccttcgatactgtcgatgaattcgtcgagagtcatggaatcacgctcgccagggcgctttttctcggccgtacaccatcgcacacggtcccattgtccgttgttctatccggcgctgttcagtattcggactttccaagcaaatgtcgcaacgactttgcgagacgcccaacgagtatcggccaggttgcccgctgaatcacgtaaaccgggagtcattgaccctatgttccgcgagtggcggcgtgaatttcaggtggatttcaccggccgcgcgtcggcagcataattcggcgctcgcgatgattgttgcgacgtcgagcggtatggcaagtgtccggttcgctcgg

SEQ ID NO: 116 - DNA, 12077 bp, Artificial Sequence
  Synthetic
ggcggcaaatcgatccgtgatttcatgaaaattttttgatccggttgccgacgaaagttcttccctgacgcatttgcgaagaggttcttcgtggctgcggggatctctgagccgcggcgatttttctcctctgatggcgagggcaatttcttcgccagtgatgggagagcccctactgaagatgattgccttttgcaccgtgttggcaagctccctcacgtttccgggccaggagtattgttccaaggttctctttgcatcatgcgtgagacctggattgtcgatgtgcatctccctggtgcatctcttgagaaaatactctgccagcatggggatgtcgccctttcgttcacgaaggggcggcagccatatggtgacgactttcagacgataatagaggtcggcgcgaaaacgcccttcctccaatgcctcttcgaggtcacgattcgtggccgcaatcatcctcacatccacaggaatatgtgagtgtcctcccagcctctcgatgctcttttcctgaaggagtcgaaggattttggcctggatggtaaacggcatatcccctatctcatcgagaaataccgtcccgccgtctgcctgctcgattttcccgaatttcctgtgggaagcgccggtaaacgcccctttttcgtacccgaatagttcactttcaagtaaagtctcgggtattgccacgcagttgatcacgagaaagggtttgtcttttcttgcgctgtggtggtagatggcgcgggcgacgagttctttaccagttcctgattcaccccggatgagaactgttgcgtccgtggaagctactcgtccaatggccttgtaaacttcctgcattgctctgcttttccccaccagggcgtcggcagaatcaatgtcttgcacggcatcgatctcaacacgagatcgcatcacgcggccggcctccagggcctttgagaccgtagccagcatctctggtatatcaaagggtttcaagacgtactcgaacgcgcccagcttggtggcctggatcgctgtctccgtcgtgccgtaggcagtcatgatgatcacgggaagttttggctgcttttcgtggatagccttgaaggtttgaaggccatccatgcccgggagacggacgtccatgatcactaagtccggctgctcagcggcgaccagcttgaggccgccctcccctgtcgcagcggtctgcacagcatgtccttccgcagacagcagcttggcgaaactgtttctcagttgcgcatcatcatcgactatgaggattttgcccactgatcaatccctctgatcggcaaggttatcacaaatcgagccccttgtcctgtcggagaatccagatggagactcccgccgtgctcttcaacgatacgcgctgctatgctcagtccaaggcctgtcccttcctctttggtgctaaagaagggctgaaacactctgtctcgaatctcctgcggtacgcctggtccgtcgtctgccacttcgatgcaaatgcgagacccgtcatcttccagggcgtaggacttttccgttatggtaataacgccgccgtcaaccagggcctcgcaggcgttggcgatcaaattgacgatgacttccttcaattgatctggatctcctctcgtctcgggcagcctttcctgacgaagcacctccaccttcacgtcgtaggattcgagcctatgcttcatcagtctgagtgctgcgtccacgaggtctgaggggcgtatcgcctgcattctcaggcgcggcgggcgagagaattccagaaagtttccgacgatggtgtctatgtgacggatttcttcggcaatgacttcaaaatcctctttttgactggcggtcagcgcaaggtccctttccattgaaaacaatctcatctttacagaggtcaacgggttcctcacgctgtgggcgacgccagcagccagcttccccacgagcgcccatttctcggcctgtgccaggtgttctcggctgcgctctagtttcgtcttggtctgatcgacgtcttctatgaggtcttgaaaacgaaggctgagaaccttgacttcgttctcttcctccatttccactttcttgttgtacgctgctgcagccagttcacggatggggccgagcacttccttgagcagtatataagctaaaatgctggcaaaggtgattgccaagcacaagccaaagagcgtcgccgcgttgctcaggccgacgcgatcgctgagccgttgtctcgcggcggcgatgctttggacaaaggcttctttgaacagccgacacgtcgccgcaatgccgttgaattgcgttcgcaagtcctgatggagtcggaatccctcttcttttcttccttctttgtaaagacggatgacctcgtcccgcgtgtcgcagtacattgcgtactgtgcgtacacgtctcggagcagccgtcgctcctcatcgtttgccgtccattgacgcgctttgcgcagccaactctcaaacgcaagatggtatttctccaactccttgagccaggcttcgtccccgtcttggaaataataggtgacatagcccttctgcatgaccaaggcattctccagctcctgggcggcttgcatggcttccaggtcagattcgatgaccgaagaaaaggtgcgatccatgatatacgaattgatcatggacatgagccctccgccgacggttatggacacgagcagggcaagcgctaccaggatgcgggttctgagactgagccttcgccacatggctgcatgattctcctttccagggtctttataccacgaggctaatgaggtgaacagcgggcagcgacaaaggaaacgacctaaacagtcgctttggccacaaaacaggaaaaggcggcagcccttgaggaatgttctcgaggtgaatcgcgaatttggacaaaagcttatttgcttgattcaggtcagctgagatggcttcgtcgccgacggctcctcacgctgacaaaaacgttcttgaagcgcccatgcgagcaaagccatatcgtgaaaaaaggtcaaaaaacctatattgacgaagcgatactatgtgaatgtacgtcaaaccataaaggggcattgcgaaatcttttttcaattgataatatatgacatccgcaagataatttctcaaaggaatgatacattgaaagtattgctcgtaagtcctgactaccctcagactttctggtcctttaatcgcgtcctgaaaatgacgggtaaaaaagctttggttccgcccttgggcctcataacggtcgccgcattgttgccttccgactggcgcctcgagctcgtggacatggtctttcagcgcatctccgactcgcagtgggacgcctgcgatatggttttcatctctggcatgggtgtgcaggcccagggcatcctcgaagtcaccagagaagccaagagaaggggcaagagggtcgtgataggcggaccatgggtattccactaccctgaggatgcctttgccgccggcgccgacatcgtggtgaagggggaagccgagaccgtcatcgatgaacttctcgcagccattgccgacgaggcgtcgggcaaaatcatttacagcgaggataagccagacctgcaaaggagtcctgcgccgcgtttcgacctcttggacatgaagagttacgcgaatatggcggtccagttttcccgtggttgtccttttcagtgcgaattttgcgacatcacgctcatgctggggagacgcgtccgcaccaaaaccccggaccagattctcgcagaacttcaaagtctctacgatcttggttggaggcgctgggtatttttcgtggacgacaacttcatcgggaacatcaccatggccaaagcactcctcaagagactcatcccgtggatggaggagcggaaaagaccttttggtttttacacgcaggcctcggtcaatatgggatcagacgagaccctgcttgaactcatgtacgcggccggttttttcagggtctttttgggcatagagacgcccgacgaagaaagcctcatcggggccaaaaaatttcagaatgtgaatactgatctggacaaggtttgtgagcgaattactcgagcaggatttcagataattgcaggcgccatcattggctttgacaacgaaaaacctggcgcgggagctcgactggttgaatttgctcgccggaaccgcattccagaacttttcacgagtctgcttcaggtcgggccaggcactgatctgtgcaagcgaatggaacgcgaaaagcggttggtgtcgttagactacaaatatctgagcaaccaaacgggactgatcaacttcgtgccgacgaggcctattagtgagatcgtcgaagaatacatgtatgtgtatcgcaccctgtacgagccaaaggagtatatcaagagggtctatgaatgcttcgagtcgatggatccgccgaagatcaagaagttctttcgcctgccatatctcaaggaattgcgcgcggtcctcatcaccacgctcagacaaggattgctttatccttcgagaaacgtcttttggaagtatttcttcaaggctttgtggaatttcccgagtagattcgatcgatatatcaccgcgtgcgtagaagccgagcactactttgatttccgtcaaacaatttatcgggaaatcgaatttcagatgcatagcatggacgaacaaaccaagagtcgctatgaggtagcccggtccctgtccccagtttcggggaggtagcccactgcgaccgagtccgagagctttttgctacaccgtgatcccgcgcatcatttctttggccgcgtgaatcaagccttgccaagagcacatcgctgggattgacaaacctcgctcctggcagtacctcaaagatatgttgactgaacgttttgactcttcaaacgtgcggagcgtatggtatcgagtctttttgcggtctttttttctcgaaaccttgtggaattaccaaaagatgcaaaatgtgggttttgtttttgccatttaccccgcgctcaaaagactctttgccggcggcgccgcgctccaggccgcagtgagccgaaatttggaattggtcaatacacacccttccatgggcccattgttgatggggctcacgctccttcttgagaaagagcgcgactgcgccgaagacgtcatcacatatcgccgcgccttcatgacagcccttgctgcgcaaggtgatcatatcttttggggcgtgctcaagcctctggcagccgcggtagggacagcgacgacgcttgtctctgggaacttctatgctggtccgttggcagcgcttttggcatacaatgttccgaacatggcagcccgcgtgtggggctttggcgcgggatggtctcgtggtttaagagtcctctctatttttcagtcgccgttttttcaccgtgcactttctttggcccgcgatgccacagcctgtggattagggagcgttgttggtgttataatatggtatatattttcggtagaatcgtcacgcgtccccatcgtcattcagatcgtggaggtgtgggctatcctgagcgctggcgcaggcggattcttcttgctctatcggcgagttccattaggcctggtgatgttcttggctgcatttggttcgctgtttttcttatcgtctatttgaatagggaatgatttgatatggcagacaatggcaatgtaattgaacgaactcttgtcgtaaacaaccctatgggcctccatgcacgcgtcgcgacaagtatggtgaaggccatggacaaatatgaatgccgcgtgacgctgcaaaaggattcagtggaggccgatgccaggagcgtgctgagccttttgctgctggcagcaacgccggggagtgaaatcgtggtgagggcggaaggtccggactcgttggccgcggtgtcagagatagataggctcattcaggaagaagaacaagtatcatctgaaatgtagcacaggaaaggtcggcctttgtctgattccgatgaacgatgcgaaaacgttatcctgaaggggatcggggtatccggcggcgttggaattggacaggctgtcatcatcgagcatcttaccaccgatatctgcccaaagaggatcatcaggccggaggatgtcccggccgagataaagcgcttcgaagacgcggtgcgatctgctgaggcgaggttgagagacataaggaatggtttggacaccaaccatccattgttcgatcacgcctacatattggagacccacattcttcttctccatgaccgcatgttttttgaggggacaaaagctgccattgctcatgagctggtaaacgccgagtgggccctcgctcaaatcatggtcagggtgacatccgcgttcgacaccatcgaggacgaataccttaaggagagagccagggacattcattttgtgggagagcgggtactcaaaatcttgatgggaattcagtccacgggtaccgtccagcacctgcctccgaattccattatcgttgcccatgatctttcgcccgcggataccgctcagatccaaaaagacaatgtgtttggatttgcaactgacatgggaggcaagacgtcccataccgccattatggcgcgctctctcaagatacctgcggtaactggtctcgagaaaatcagcaagatagcccaaaccggggacacggtcgtgatagatgggagcacaggggtagtgataataaaccccgatcctgaaacgatttaccgatatagagagcgagcagaggtctatcgcaagtatcaggattcactaatggccttcggccttcttccggccgtgaccagcgatggaaatcgctccgtccgcattaccgccaacatagagctggtggatgaaatatctttagcggttaaccatggcgccgagggcgtaggtctcttcaggacggagtatttgtttcttggccgttccgatttgccctctgaggatgagcaatacgttatctacaaacgtatagtcgaggccaatgcgccaaatcctgtgactatcaggacgcttgacgtaggcggagataaactctccgcacattttcgaatttcccacgaaaccaatccagcgatgggtctgagagcgatccggctgtgtctgagccgagtggaccttttcaagactcagttgagggcaatattgcgggctgcttcccatggaacatgtcgattgttgatacccatggtgtcgtgcataaaggagctcattgccacaaaagagatacttgctgaggcggcagacgagcttgcagccaatgatattcctcacgcgtctagaatcaagataggcgtgcttgtggaggttccctccgcggtcgccatcgcagaccttcttgcgagggaggtggatttcttcagcataggcacgaatgatctcattcagtacgccatggccatcgaccgagtgaacgagcaggtcaactatctttatgataccctgcatcctgcggtgctgaggctgatccgtcaggtcaccgtagcagcgcaggcaagaggcatcgaagtggcgatgtgcggggaaatggctggggatccggtcaatgttccaattctcatagggttgggcatcgatgagctctccatgaacgcgctagccatcccattggtgaaaaagctcgtgaggtccgtcaccgtcgaagagtgccttgaacttactcgccaagcctttgatatgcaggacgcggaatccatacgggctctgctcgaaaattggttgagagaccgattcccaggggattattttattgatcactcctgatgtgcgttcatgaaacaacaaggtcacataaagattatctgcaagaacaagaaggcccatttcaatttcgaactgggggatacgttcgaggcgggcatcgtcttactcggatcagaagtaaaatcgcttcgcttgggcaaagccaacctcacagattcctatgcgaagtttcggcaaggtgaattattcctcgtggatgcgcacatatccccctaccctcaagccaacagggagaatcacgatcctgaccgcgaccgcaaattgttgcttcacaagcgtgaattgaaacggctgcttggtaaagtgacggagaagggattttcgctggcgccgttgaaactctacttcaaagatggtaaagtaaaagttgaattggccttggcgcgaggcaaaaagctctttgataagcgagaggctataaagaaaaaagaccagcgccgcgagatggagaggctggcgaaattcaaacacagcggacgatgacgcggcgatcgtgtcgagcgtcgatcgcgcgcagaggcgggatgacctaaatctgagttgagctggaacaaagcctctcggtcgttgtctgtataagacggaataatgcacatcctttgaaagggggcgactaggtttcgacggggacagttgaggtcaaggttgcatgccgagcgctccggtgactcgttaaaccgccgggaataaatatactcgccgacaattacgagtacgctctagctgcgtaagctagcgtccctcagcctttctcctgcgggggttgagtgggcgacgggcagcaggatagccaatgctccgagcctgttggagcggcggcgaaacgcttagcaggctggtctgggaggaccttttccgagggggccgtaccggacgagaatcaaaactcggaataagcatgtagaagctttgcactgaaggtttccggacgcgggttcgattcccgccgcctccaccagtaatattaataaatattttcgaccctagcctctcaagaagccagactcaaaactgagtgggatatcttcttagtccgctacagatttctcataaattcctgttcaaccgacctccatttgggttacaatcgcagcgagctttcccattctttggccactgagaggcagtcgccatgataaccctcgcaatcgactatggagcctctaacataggaatagcactggttcgtaacaccgaggaaggaaatgaacctctctttgcgggaacaatcatcattgacgcaaagggcgtcaaagacctggctgaacctcgtgctgccatccgaagactgaggcgtaccaggaagacgaagatacggcgcctgagacaactcagcctagctctgaagaggcttggtttgggggaggaggtctcccgcatagtgcggttcgccaggagacgaggatacaagtctctttttgatgaccctgatgaagcgaagcaaacgaaagatgacgtctcaggctatcgttgcaccagagaagaattcttccatgagctagagcacgaattacaagcaatcatcattgacacagagcagtatcacagagccctttctgtgtgtgaacgagtcctcaaccgcagaggagagcggtacggtgaaatcagacccctcaaaattgacaatcgcggtaggagccgctgtgcgtgggagggctgcaacagagtcaccccgagacgccacaacgcgactgacgacgtagttcggcagcaactcgtaacctattttcaaagccctctcaggagggagccaggcaagctccccatgctcgaacaggcagttgtgaaactggacatcatatccaagaatctccggggttccaacgaagccaaatgcagaaacgcccttaacaagagagcaagaacaatcttgagaggtttgcaggctgcgttgccgatgcatgaggatgaaggtggcagcgataaagaaagctgggagtatgttgagaaaggagtagtcaaaatccttgaaaacgcgggtggcagaaaccgctactgcagagaacacagcaaagcatattgcgacagagttttggagggtaaaccatctgaattcaaaagctcaattcaggagtccgatataatctcccggcgtgaacagataatctttaacaagctgtggcgatacatcgaagcaaggctccttccgttggctccagaaggaatcgacagaattgtggtggagaggactgcattcgacctgcttgcaggaaaacaaaaaaagattcgggacgcgtccagcaagtcggtagagagtatctatcagtatggtccaaggtatggcttcacgagtgagaaggagatgctgcgcaaggaattcggcgggctctgcgcatactgcggcaaaccatctgagaccctcttggagcgggagcacatactgcctcggaggcttttctttttcgacagctacctcaatattctcccctcatgcccccaatgtaatgctgccaagggaacatctcttccgggagtgagttctctcagagttcacgaagacgcataccgcaactatgagagctacattaatgagttaaagagcaagcgacctcttcatttcctccataccgaaaaaaagggaatcctgaatctcatgcgagaccctgaaagggcatgggattgggaacgataccttcgtctcattgccaacaatttcgcctccatcgtccaaactcagcgcggtccgcgtccttttgcgcgatacctgtattcaaagctttcccggagacaggaaaagccgcctgaaattgctttcagaagtggtcgtcatactgcattgtacaggagcgttgcctatcctgacttcagcaaggcccaggaaaaagcaggcgaagacgggaacagtcatcctgtgaaccacgcactcgatgcgctcttgttggcgtccaagctgccgcgccccgagccactggaagcacgaggactcaaccacgccagtcttaaagcttgggcggatcaagttcgtgggaaagcagcgccggcgggagaggacggtatcccagtgattcctgcatacaagtgcttcgtaccgggttttgaagagacagatgctcatgggtatgtcacggttgagatggcgatgatgaactggaataaaaaggatactgcaacaacgaaacaggacccttacgggtggtctgaatccagacaacacccgacaaaaagagtttcagcgagaactctgttcgatgacttaagagaggaaaaaagcaagaagaatccatctgaacttatcaagcgcatttatcatcccgcattgcgctccgctgtcgagaaagcatatcaggagtcccacaaccgcatccaggcagcagaggctctgaaaaactggctcagagactctgtgaagaatagtctgcgcagctccagcttctctcgtcatccgagtgacatacgtcgaaggcaagacttggaaaggttcgccaatggcaagacagatgaaattcctgtggtaataggaattaaatgcctcgatacaggcgttgctggaaaaatagacgctgctcgtatggaccgtcaaaccgggaccacggggcaccgctacctgactgacccagccaacaggggcgtggtgcttgcttatccaacaacacggtctggcgcctgtgatagaagaaagccatgcacagctggcatcaggcaaaattattctctcaaaaccgatgagactgcgtttcggtcaatgccagcgtcattggaacgaggcgtggtctggggcaagaaaacacattctcccagagccatggagtcagcgttcagcaaagaattggagcagtatcttcgcgaccgtcgctttcacagttactgcattctcacagccggatgtgtggtctgctatgaggacggcacagagagattcataaggaactttgacaagagcaagggcttcaagaagacaatcctcaggaacatagtcgcgctgaagcggactccgctctcaacgcgtgttgtacctctaaaagtgttgacagcactgccgtaatgagaatagaaatagaaaagacactcgttctttgacaaatcgttcgatatgttcagctccggttgaaaagagcatccgtctggtagccatgcactccggaatggggcagttccggctcttgcgacttagtgggtgaaagctcattgagccaactacgagacacgtctctacgagacaggatgtgagcccttatttatcatgatttcaagctgaattttccgcagtcgttgcgactacgtgtttgggggatatactggttcctcatacctagtttcaatcaagctgaattttccgcagtcgttgc

SEQ ID NO: 117 - DNA, 2657 bp, Artificial Sequence
  Synthetic
cgatatttaaaaagcgggccacgttgaccaaagaaaagagcaggtctcccagctcctcttcccagttgaccgtggccgtcccgctcagggcctggcgcagttcctgccattcctcctccaccttatccagcgccccttgtaggtgcggccagtcaaagcccaggcgcgccgcggcctcccccacccgttgggcctggaccagggccggcatggccttggacactttccccagggaagcgggctcgcccgttttgccttccctaactttggcctgctgccagagctgccgcaactcctcctgggtctcggccttttccccggcaaacacatgagggtgacggtgaatcatcttggcgccgatcccggccgccacctcggcaaaggaaaaatagccccgctcctggtacaggtcgcttaaaaacaccaggtgcaaaagcaggtcccccaactcctccttgatcttgtcggggtcgccgctatctaaagcttcgatcagttcataggcttcttccagcacataggtcttcagagtttccggggtctggcgggcgtcccagggacaacccccggggcctcgcaagcgccggacaatcgcgataaaggcggccatagccgccccgggatcatcgtctttatcgggcatagaaaataaactcctaataattattcggacgtgcggaaagggccgggtaagcaggggccgggtcacccccccaccccctcacatccccttagttaatgtagggcgggcattgcccgccattttcttgtctctcaagcttttcgtttctcctgggttttctgccactggcggaggtaatcgttcaaccgctgtttaaagtccgggggcagcagtcccagggtctgccgggagaggtgcatgaggtacggaacagcccgggattctctgaacaggcgggagtctcgaggcaggaccacgcccagaagcatcgaggcgaagcctattagcaaggcccccttgaccagggcaaaaaacgcccccaggagccggtcaaagaaatccagatacagatgatacaacaggcgttggagaaaatgggccagcacccgggtaacccagtaaacggccaccagcgccaacgcaaaggccaggaggcgggcgtagaggggctctttgatccagggcccaaaccggtccgccaggcgcaggtaggtgtgggaggccaccaccacccctcccaccaggcccaccaggaccgccagttcctggaacagtccccgatagtaaccccttaagctgatcaggcccagtaagaccacaatccccaggtctaataaattcatgcgcgccgccttttatacctgacacccctatcaaaaaaacccgcacccgtcaagcaattggccaaggtaggaacactacgcaagagttctccccccgaaaactccccttcttttcttgaataacaaatttattgctggtatcttaaacacagaataaacgatttgggtactcaacttgaggtgcccatggcttccaccttcaccctcgccatcgactttggatcaaagaacatcggcctagctttggtccacaatcagaaccgcgtcaatatccccctgttcgcaggcaccgccctttacgatcggttccatttgagtaaaaaggtggaacctcgagtccagatgcgccgaatccgccgcaccaagaagaccaagcaggcaaggttgaggcgccttgaggccgggttgctctcgctgggcctggagcgggaattggtgggctggttgatcaatttctgtaggcggcggggatacaagtctctctttgacgagggaagagagcccagacgcgagaaaactgaggaagacgccgaggttttccggttctctcgcgaagagttcttcaagaccctggagaacgaactgccggcgcgccttcctgaggatcaattattcccggtgctgcacttatgtgagcatgtgctgaatcgcgatggtgaccgctttaaagaggagcgcctgatccgcattgataaccgcggcgcgtctcgctgtgcctgggacggctgtagccgcgtcacccccaggcgggacaacgccctgcgcgatgtcctggcccagttcgtattcacggtatacgcccaggacgtgcgcggcaacccggacctccaaaagaaggtcgagaggatgcttgatagggttgccgaactgggaaagcgcttccgccacgcgagcggcccccaccccgaagtggaacgcaaggttctgcgcaaggccctgggggaagagctgaagctcctcaaaggcttgtccggcctggcccacgacctgcccgaagaggagattgcccccagggaggcctggacttacatccggcgcaacctgatgaacctcatcgaacagagcggcgggcgcaaccgcttctgccgcccgcacagcgcccagtatgtctcacacctcttggcaggccaggttattcccttcaagcgttcactgacggaaagggacatgacctccaggcgcgaggagatcttgttccagaagctgtggcgctacctcgaggcgcgtgtcctgccgctggctccgggcggaattgatcgcgtggtggtggagcggaccgcctttgatctgctggccggaaccagaaagcagcgccaggaagtcgccgacaaggattacctggaggagatgta

SEQ ID NO: 118 - DNA, 22829 bp, Artificial Sequence
  Synthetic
atctgggagttatagtaatagaggagaaggcaaagcacccccgtaaggatcaaggcaagagcgatcagtttccctttggttcggagcgagaatcccatagaaatgaagaaaggtcgtctgagctgcaaactttcaaagaatcttccaagctttcaataacataaattgtccgcagagtaaaggttgggggcaaaccccacctccaaaaaataccgtgcctcccggtttaaaatgagggattcacccctgtgataccgcctaacgtatcatggcaaacccaatgaccagaacacccaagatcaatcggtaccagacgaatggtaagaaatccttggtctgaacataccggagcaaaaagccgatactggcaatgccggttacgcaagatgcgaacatacctaccataacgctaaaggagactaaagatgaatttgaaatgacgtgcggcagtttaagcacggcagcgccaaggataatgggagttgatagtaagaacgaaaacctgactgcgccctcgcccgttacccccatcaacaatgccgtgctcatcgtaatgcccgagcgggaaactcctggaataatcgccaccgcttgtgatactccaatcaataagctggaccgaaaggtgatctgggtaatatcaatattcttggcgcttctccggtctgcccagtacagaagaatgcccatcaatatgagcatgatggcgattagagtaggcgatctgaatatcgtttcagcttttttttccaggaggaatcccccaattgctcctggcacactggcagcgacaagataccaaaacaatctaccctccgtgctccggagatcagtaaagcccttgataatgagtcgccgccagtccttccagaaatagatgaccacggcaaccagtgtgccaacatgcaaggcaacgtcgaacgtaagtcctggatctgcccacccgaaaagccacgggaccaagaccaaatgtgctgagcttgagatgggcaaaaactctcctaaaccttgaaccagtccgagtatcgctgcctgtaatagagtcaacttctgccctccccatgatcacacgcaaaaaacccgaaaagaaaagccctgacggatgtcagggcccagtaacagaactggtgtccccaaccggattcgaaccggtgttgccggcgtgaaaggccagtgtccttggccaggctagacgatggggacaaatcaaaacggaataatggaatattggaatgatggaataatgggttaacagaaactctaacccattactccagtactccatttctccagtgctccaatcgtttccttatggtgggccgtactggactcgaaccagcgactctctgcttaaaaggcagatactctacctcctgagttaacggcccgatgataattaaatagaataaagggaagaggctgaattgtcaaggaaaaactgagattttcggtgacccttcgacgactgacaaaaagaggtccgtctctcacgggggtcgtaaagaacactgaggaagtaatttaaatcttactttcgacaatctcggcgaactctgccggagatagatctgatctcagcagttcaggaaaggattctgaactcctatcgtttcgtttctttccgaccctactgaaaccatcgtgatcctggttcgggtgagctcttcaatcctcttcaagtagcgttgtgcatttcccggaagatcggaaagattctttacctcccttatttcggttctccatcccggcaattcctcatagaccggctgcgaaccatttagtttctccaggttcgatgggacatggtagaaggtctcaccgcccaatcgatatcccacacaaatcttaatcgtatcgaattcgttcaagacatcgagcttagtgattaccaatccgtgcaggccgttgatccggatcgcatggtttacgatgactgcatcaaaccagccgcacctgcgcggcctccctgtggtcgccccgtattctccgcctttttgacgtatcttctccccctcttcatctctaagttctgtcgggaacggtccctctcctactcgggtggtataggccttggccacccccaacaccgaaccgatgagcgtcgggccgattccagagcctgcacacgcattcccggctaccgtattggaagacgtcacatagggataggtgccataatcaacatctaataaagcgccctgagcgccttcgaagaggacatgctttcccttctggatctcctcgtggaggaagatcgaagtatctttcacatatctttcaagctgcctcttgtaggccatgtactcatcataaatcgctgaagcctcgaaaccctcttccttcaagatttggaccagatagaggttcttctgtttgaggttttcctccagcttcttccgaaacaccttctcatccaaaagatccaccattcgaatgccgcagcgagccaccttgtcctcataggccggcccgattccccggcccgtggtcccgattttgaagaccttttctcgagccacatcgatcctccgatggtagggaaggatcaggtgagcctgctcgctgatcaggagctgggagtcatccttgaaatagcctctttttttaacgtcattcatctcttggatgagcacggccggatctaatacaaccccattcccgataatacatctcttgttctgatacaggatgcccgaaggcatgatgtgaaagacgaacttctcatcgctaatcaagacggtatgaccggcattattgccgccatgaaatcgtaccaccacatccgtatactgggttaaaagatcaacgatctttcccttaccctcatccccccactgagctcctacaatcacgataccagacatttaaaatgaaccctccgtgtttcctgtcaatcatttcttcggccatccgccaggcatgagaaatggccgctcattagaggtgaacctgacgaacagagatgatattgggcagcttcaggatctcatcagccattccaggcgataagggactatccaggtgaagcagagaggtggcattgcctccctttcggttgcggaagaactgcatcgtcgctatattgatattctggctcccgagagtccttccaatattcccaatcacccccggtttgtcataattgttcaccagcacgatgtgcccttccgggacggcttctataaaaagatcgttgagcctgacgacccgaagctcctttcgtccgaagagggtccccgcaatatagttctcttccgagttcgctcgggccgtaatgccgatcaaacttgcgaaatcttcagccttctcgctggtggactctacgattcttatccctctttcctgagccacaatcggggcattgacaaagttgaccgtttcacccacaaagggagtaaggagtcctttcaggatggagtttttgatcggttttgtcccgtattcgatcacttcgccctgatactcgatcacgacttcttcaatggcatagttcgagatctgtcccagaaagctccccaacttctctcccagccggaggtaaggtcgcagcagcggcaaaatctcagggctcaccagtggaatgttgaccgcattcggggcttctcccaacgttaggtaatccacgatcttctgggcaatggcaatggccacattctcctgggcctctcccgtcgaagccccaagatggggggtacaaataacctcatctaattcaaagagcggattgggaccggccggctctttttcgaaaacatccaatgctgcccctgcaacccttccctccttgatcgcatcgtaaagatccttctcgttgatgatcccaccccgtgcgcaattgatgacgatcacgccctttttggtcttcgcaaacgcgttcttatcgatcagataccgggtctcatcattgagcggggtatgaactgtgatgtaatcggcacggctcaggagctcatcgaacgaaaccaactccactccttttttctccgctgcctccttggagagatagggatcgtaaccgatcaccttcatcttcatgcccctcgcccggtcggcaacgatcgtcccgatcacaccgataccgacgagcccaagggtcttggtataaagctctacccccatgaacttctttttctcccacttgccccccctcatggaggcggtcgcctgggggatctttcgtgagatcgcaagcatcatggccatcgtatgttcggcagcggcaatggcattctcctgaggcgtattcatcacgacaatgcccttcttggttgctgcggggagatccacgttatccagtccaatccctgccctaccgatcactttcagccggtcggccgcctcaatgatatcggccttcaattttgtctcactcctgacgatgatcgcatcatactccggaatgatcttcttgagctcctccggaggaaggcccgtcttgatgtcatatttcacattctcggcccgcccaagaatctccagtcccttgttcgatagaggatcactgatcagtattttcgtcatcttttccattctcaactccgtttgggttcattgggtcattaggttcatcgagttatagggttataaggttattgagtcaaaacccgagcaacccgagcaactcaagtaacccaagtaacctatttcatgaggacctcctccgctgccttcactccctttcccagttcaaacggataacccatctcctttaagagcatttcgagggctgagatcaccaccaccatatccaacctctcataatagcccaggtgagcaatccgaataatcttgccttttgcccggtcctggccttctgcaaccgtaattccgaacttctcaaagaagagattccttaatttttccccgtcaataccctccggaatcttgacggcggtgagggcgttactgggtgaatggggcgcatagagttcaaggccgatggctctcactgctgcacgggtagcttcggccaatctctcgtgccgacgaaagacagcttccagaccctcctgccgaatcatacggagggattccctcaaaccgacgaagagggaaatcgccggtgtgtaggcactctggttttttttcgaagacttcaattccttcttgaagtcaaaatagtatttcggcagattcgaccgttctgcaaacttccaggccttatcagagagcgcagcaaaagcaagcccggggggaagcatcagcgccttctgggaaccgctgaccacgacatcgaccccccattcgtccatggggatgctgaatacgccgatccctgtaatcgcatccacaacgatcaccgtattctcaaatctcttaacaatctcggcgatctctcgaatgggatgctttacacctgtcgacgtctcgctcgcctgggtatagacagcccggatggtcggatccgatccgaggatctccgcgatccgtttcacatccacggcccgaccccattctacatcgatgggaataaactcaactccataggccttacagatctctccccaccgttccccgaacttgcctccccggacaacgatcgccttatcccctttcgataggagattacttacagatccctccattgcgcccgttccggaggaggtgaaaaccaggacctcgttctttgtctggaaaaggtactttaagccctcccggatctcctcgaaaaccctctcaaattccggttcccggtggtgcatgatcggttccgccatcttcagaagaacttctggtggcaacatcgtcggaccgggcgaaaacagatactttttttccatggctactcccccattcgaaatttaagagcctttcaatattattgtataagacgttctatgtcaacactttttatggggggttcgaatgcctcggttttgggtattcgattgcgatgcgaacgggcaggggcgacttgggtcgcccttcagcaggcccccggtaaaaccgggaccccaccctatgtgaccccgtaaatctaaggcatgacttctttctcttcaaatttcttgactttttaaggattattttctaatttggaattgaaatggtacgggtggatgagccgtggaaccgatggtgacaaaaacactcgctgagatctatttaaagcaaggccatcttcgagaagcctatcagattctcaaggccctctcggaaaaagacccgttcaaccaggaagttcaagagaggttaaaagaggtgagcgagcgccttggcctctcgaatcatccggagccggtagaggcttcctctgttctgtcagaagaagagagaattcgcatccttcaaaagtggctctccaacattcaagagcaaaggaaaaaataatgtcccctatccttcacgaaacaagacgggcatctgttcgggcaatactccgatctcgtaacctcgatgccatcattttcagtagccttgaaaatatccggtatctctgcggtttcaccggaagtgatggtgctctcgtcctcacgccgggagagtctttcttcctctgcgattcccggtattggacacaggcagagcaggaggtcaaggaatcccggatcgttcactacaagaaaaaaatagaaggcatcgcaactctcctgctggagttcgatcggaagcatatcgggtttgaatccacctctctcactttctcgttttatcaatctttgggagggagacttgcaggtcagggagagctcatccctctggaagaggagataaagggattgagggttttaaaggatgctcaggaactgtctcttatgaaagcagcgatcgatatctccacaaaggcccttcggcatatcctcgacctgatgagggaaggcgctgtggaaagcgaagtcgcctttgaaatggagtgtttcatgaaaaagaagggagccgatgccgtagcctttgacaccattatcgcctccgggaagcggtcagcccttccccatggaaaggcgagcacaaagcgaatcgagaagggggatctcctcctcgtcgattttggctccaggtttcagggctaccattctgatgaaacatgcactgccgtcttgggccagccttctcccgaacagaagagggttcatcaggtcgtcaaggatgcccacgacaaggcgatcgagggggttcgaccgggaatcccgatcaacgaagtggacgcgattgcaagaaattacatcaggggttgtggatacggggactattttggccatggattaggtcatggtgtagggcttgcggtccatgaagaacccggtgtaaacggggagaataaaggggttgtcgaggagggaatggtttttacaattgagcccgggatctacattcctgactgggggggagtccgattggaagacatggtcctggtcactgccggcggggctgagatcctgacctatcttcccaaggagctgatcgtgctgtgaaaaggctgcccctgcccttgacaactccggtccttttctattatttttgttgttgttctttctggtttgattctttctccaaagcgggcatagctcagctggtagagcatcggcttcccaagccgagggtcgcgggttcaaatcccgttgcccgctccatataacctattgaaaattcaataattttcaagatattccctcctgaaaagccaaccatttaagaccccgattgtgactgatttgtgactggacttttccccatttccttcttgtccaactttagaacggcgtccctcaaattctctggagccagatgcgcatacctctgagtcatcctgctatccttatgtccaagtagcctttggaccgtatacagatccactccattttgaatcaacgcggatgcatagcagtgacggagatcatgaaatctgaagttctctattccagccgttctcaaggccttctggaatgctctcttaatttccacatatcgttttccatcggttctacaaaagacataggatgacctgatgtgcctcaccttggagagtcttttgaaaagctccagaagcgtatcgttgatcgggatttcaagcctctcattatttttggtgtgttcgaggaggatgacctttcgaaacaaatcaacttgttcccattccaaggacaagatattttctcttctcatgcccgtgtgtctggccgtcattacaattggctttagccaatcagagcaggcattgtgaagctcttcaaattcttcatcgctgagatacctcacccttcccggaggttccttctctaacctcaccgctttgacaaagttttcctttaacagcctccattctccacaggccattgaaaaagcatgtttcaacaaaaccagttctcggttgattgtccctggagaggcaccttcttcccatctcttctgcttgtatgaactgactttgtcggttgtgatgtcgggcaagacgtaatcccctaaatatggtagcagatgtccgagactacttttgtccctaatgtgctgctttggtgattttttaggagaatgctcgttcatataccttgccatcaattctttaaaactcaaagtttccccgggtagcttatcaaaccacttgccttccgcgatcttcccccctattttgtcatgaattctttgggccagctttttaccagtcgtttcagttgatcgtctaatccgtttccctttgacaataaaactcatccaccaaaccgagcctctcttataaagacccatcggatacctcctttctgaggcccttgaggtccggtttcccgttgcccttaccgtaatctttcctcttcccttcgtcaatagcctttcgaatgatagcgtcaacgcctgtctttccatttccagagattgactttatgatctccttcgccctcttttgcggatcaacaggctccaccttgtttgatcgcagccattcttcgatttcagtgatcttaaaccggatgagcctgccaagtcggtgatgggggatctcttttgcttcgaccctggaatatgaaggtagatttctttacggcgagatactctgacaattcttcgaggctgtaaaactcctttgccatatggcgcacctgtccccttccgcaggagaagggaacatttgtcgcctcatgggcaacttcgccacttcgttctgcacaaaagattactttgctccaaatctacaaagcaaccgcgcccttggttaccgaggggacctcggcttgagggaaccctcagcccgtggggtcaacggcatattcagttgtcaaagagcgacgcgagatgaagggaatgggaaaaagtgggatcagagggacccccacaaaatccatgcccttgaatcttggctcatctcattttgatttcattcaggcggacaaaaagcggattgtccaggatatcatctcatagaaggtaggataaactaattttatccaaagaaagattttttgtcaagcaactttttttacgttcaaaccaacccctcccctatcctgggctccacgccctccctcttttgggtcttctccaaaagtcctacccctgaaccttttgggccttcacgccagtattctcccaaaccctaaaattcatcttttaaggcccctctgtgccggagggcaattgatttataggccaggggggaaagagcgcttataaattcgttttagagggtttttaaactggaaaacaagggatataactggcggaaattgctgctaatttgccaggagggggattatgggagatatggtggtgtgaattcttccttttcccccggcaatcctgctttctgggattggcgattctccgggatcaccttatcgacaatcttaccgcaagtgatgcatctccatgccggaaaggttcattggcagagtagaaatccatatcggaggaaatccttgatgcttttcggaaggagggctcgaccggctccacataatttttctattgaccggacaccgaaaaatgcgtagaattcaaccatccggctgattgctaaccgtcttctctcgggaagaattacaggagtctttttaggaaagacttcacaatgattacactcggaatagattacggctcatccaatatcggtatcgcactggtgaggaacaccggcgagggcaatgagcctttattcgccggaacgatcaaaatcgatgcgagaaggctgagggataaggttgaaacccgtgctggcatccgacggttgagaagaacgaggaagacgaagagacatcgtcttcggaatcttcggaacaggttcctgtcgctcggaataaaagaagaagatgttaacctgatagtcggcttctgcaaaagaaggggctacaagtcgctcttcgatgatggggaaaccgtagaatccgaaaaaggagataatcaactcacgtatcggtttacgagagaggagttttttagaaatctcacggatgaactcaagaccattcttcctgattcttcgcaatttcaagatgcccttaatgcctgtgaaaagatactaaatcgccgtggtgatcccttccaggaaatccgattgataaggatcgacaacaggggggcaagtcgttgtgcctgggaaggttgcgacaaagtgactccccggagggataatgcccttggcgaccctatcgcccaatcgctgcttaatgcggttcaggaaaatcttaaaggtgaacctgcccgaatggggacaattgaaacggatatatcggaactggatactcttggaaggcgtatccgggccgcttcaggagaaggagccaaagaggagaaaaaggctctgcgtaagaatgcccgaaaggttttgagggaaatcaaggctgactttttcaagcccgacgtggatgaagaagaacgggatagggcctggaagtatatcgaagcagggatcttgaacatcatggaaaatagcggtgggagaaaccgctactgccgggaacacagtaaagcctatatccagacagtcctttccgggaaggcggccccatttaagagaaccatctctgattcggatatcatctctcgcagggagcaaatagtataccagaaaatctggcggtatcttgaggcgagagtgtttcctcttgcacctgaaggaattgacaggattgtggtggagcggacagcctttgacctcttggcgggcagcagaaagaatatccaaaacgcttccgatcaattcgtggaggagatgtatcagcatggacctatgcatgggttttcaagcactgccgaaatgttgaaagaagaatttgccgggatgtgtgcgtattgcgggtgcgaatcggctgcccttatcgatagggaccacatccttccacgggcggattttttcttcgacagttatctcaatattgttccggcgtgtccgaaatgtaattctgacctaaaggggaagcggccaatttcaacttcccttctgcgcatcgatgataaggcatatgaagcctactcccattaccttcagaagatctctaaaagtcggccaatgcacctcttccatacgattaaaaaaggggtgctaaatctcatgcgtgaccccgaaagatcttgggaggtggaacgttacctttccctgatagcgaaacagttttccgagattgtgcaaacccagagaagcccccggcctttcgctcgatacctcacgtcaaaactcattaaacgtcaagagaagatgccagaaattctattccgaagtggtcggcacatcaatctttatcggaccatttcctacccggctttcagcaaagtcgaggaaaaagaagagggaaatacggcgaaccatgccattgatgctatgctgctcgcttcagaccttccgagtcccagtcccctggaagccctgagtatccccgtatctctcgtcaagagatggtctctctcggtgcaggagagtgcgcctaaaaccggaaggaatggaattccggagattccttgtcacggttcttatgtggacgggtttgagaaggtggatggaaatgggtatgtggaaattgaactggataagatgtcttggaaccagaaggaccgtatgactcacaagcaggacccttatgggtggtcacaaaaagcacaaatgccgacgaaaagaaccgccgcagtcgatctctataactcgctgaagaaggaatccaatgtccaaaaggtaaaaaatataattgagcggattcatcatccggctctgaaaagggttatggcggcatccgcaaacagtgaaaacccaggtggctctgtggcagagaccatgaaaaagtggctccgccagtccgtgcaaaacagtataaataattcttcgttctcgaatcacccaggagatcaggcccggaaaggggacctcgaaaaattcacaagcgaagaaaccgctatcccggcagtcatcggcataaaaatgtttgatacgggcgtaagggggaaaattgatctgtcaaggatagataaacaaaccgggaaggtaggccaccgctatatgacacagcctgcgaatcggggagtcattctggcatacccaaagaaaccatcgggagaaccagacacagataggccctacctggctttcattaaacaagattcctccttgaaaccagagggggctatgtttaagcctttaccagagggaatccttaatgggaaaatccttgggacgggctactcccccggcgaatggatgggtcaggtcgagaattatttgtctgaatgcggtttccacagttacgtatcgttgacaccgggctgcgtagtttgctacaaaaatgggaaaaaatggttcgtcaggaattttgaccagagtgcggattttaagaaggcaaggcttaaggacgttgcagggatacaaagaacacccttcataactcgcatttctccattaaaaatgttgacataactaaacctttggtgataaaagataaataatacctgttctttgacaattcatgaatgtaaatcagttccggttgaaaagagcatccgtctgaagggcactccgggatagggcagtcccggctcttgctgtttccctggcacatcactgtgctccggaaatgaaccctcggacaagtcgaaagacaggatgtgagcctaatttatttctgcaatcataactgatttcttgcagtcacttgcgacttaggcatcccctatacggagtaggaccccggagtttcaatcaaactgatttcttgcagtcacttgcgacggtaggagataccccccctgagttggcgctcaggtttcaatcaaactgatttcttgcagtcacttgcgacgtgcattggtgccgcttctcaacgtaaccacgttgtttcaatcaaactgatttcttgcagtcacttgcgacttattctgcaaagtgtcctcattgcggtgtaaagtttcaatcaaactgatttcttgcagtcacttgcgactgcccgtgaaattgatctgtattccgtagagtatgtttcaatcaaactgatttcttgcagtcacttgcgactgtcaccatgaattgtcaaagggcagccataacttacgctcccgtttccgcgaacctcggatttcatgtctgattttgacatctgaaatcacctggttcgcggttgagggtgcaggtgtggatgggactcattaatgtccaaagatgttgaatgagttgataatccaggggggggatatgccaatgttttgacggtccctcccaatgtgaagcatgaggagagattccgaaaggcgtaccgggaggcgagagaagagacgagcgggttgtggaggtgagggggggcggagcctttctctctgaagttttcgattacccaatcgtcattatggggaggtgaagcaagcttgacgggaggacctatgacaatctgaagccgtagaggaggttacctaccgaaaaacttggcaccgacacagaaacttcttgacaacattgacggaaaagtgtagatttttctaaattaatcgttttcagattatctccaaagatgtaggtcgctttttggatattgagggatcttagactttattcggattgacttatgaaaacctacgtagttacctttgaaagccattcggatgcctctcgggaaaaagtagcggagcgtcttaaaacctatggttactactgcccaatacataactactgctgggcaattatgacggaaaaaaccgctatggagattgtcacctaccttaaggaagttataaattccggtgaacgactcttcgttgttaggtccggcacagaaggggcatgggtcaatatctacggcgaaaaaaatagcgaatggcttaaaaagaacctatgactggaaatcttcccagtgaacaaagcggtcaaacgggaccccgcattcgtcatggtcgagttgaatcgattgatctttacgaaatcaaagacagtgaactcgacttactcgaaaaaggctcaccggcgagcattcaactcaatttctcgatttttctgttgtcaatcgccttcacaagcgttggctgtcttgctaccgcaacctttacaaaccagaccgtcaagactgtcttcgtattcatcggggttattgggattatcatgggagcatacctcttgatcttatgggctcgcacgcgctcttcaataagaggggtcgttaaaaccatcagaaaccggatacctatagaaccttgtccccaacctcctgggacattgcccaaaagttccgaaactggcgagggagacaatgagcctgtggggtagatggcaaattgcccggaagaattggagcgtgttttaactccaatgtcacgggcgcggacgacttcaaggggggctcttacgctcggcagggtgatgttggtcacggtttctcgcatcggttctcctcctcgtctcttcggataaccgatgataacaccgcgcccaacagatttcaggcaagcttaccgaaaggacacaatgtatctcgatgtagattgcagacaaccacgacacattctccaaaatctgaggtttaaccccgctcgaatccccgcccaatgaaaaataatatggacttcgaaaagtatcatggtttaaccgcataatatcaccattaaaacactatccaggatggtcaggtcaccccttcttccccttgtctttcttcttctttccgacttccacaatttgccatttaagttcatgaccgacaagcctaagaaggctttggattctttcgagggcattgtcacatcttcgaatcctctcgtaaagattcgtcccttgtagcttattcctgctggctatcccgtaaaccccacccttcttccgaaagatatcaagaatcttctccgatatggtcgatattcgagagcgtttcggtttcccttttggcttcttcatggggactccattccatgagggggatttgtgtatggaattatgatatattattttatggagaaagtcaaaagggatggtcccttcgaatctgactcctcaagacctgtctcaattggttactcatatcaacccttccttttgggctttctttatgaatagccgccagacaaatccctcggcatgggcttcgctctggaaatatgattcgggagtgattaaatcatgcgggtcgatttccagcatttgctgaatgataggcttgaattccggccttaccaccgcttcgatttccttaacatagttttcgtaattcatagtgaatgttatggcagtggttttcatttttgcttagcacctccggtctttcttcataaatgattccgtccaggaatcgccctcctttctctttatccctcccgcccatctgcttgaaaaagaaagggatttttgccgataggcattggtcccttatctccaaggcccattctggttgcatgggcctcgctcgttttccggattcgccacccacgattacccaatggattccttcaaggtcaaggttcggaatgggtcctaagaggggttcaaaagaaatgaatttggtaacggcatgggtctttctaaggtcgtcgattcgggaaaggtagtccgaatcttcaaccgttactcccatcaggatatggggaccccaccttaatcggggatcgagcttcagaagttgctctgacctcttggttaagatttgataaaaatgccagtcggcccggtgcatggtatcgaatacctggaagataaaatcgtcagggacctcctcatgaaagagatcgctcatggagttaacgaaaatggtccgagggcttttccacttcaaggggagatccacaaggttttcatggatggtgagtcttgacccgttttgatagctcggaagacccattgcctttagccgttctgcaagaggaagggcataacaattcagacatccgaggctgaccctcgaacatcctgtcaccgggttccaggttgaatcggtccatgctatctttgacctcttccccacttatcttcacctctttcctttcccctattttaccaaatccggagtccattttcaacataaaattaagcaatatcgaggacttgcatgattcttaggggtttgccaagaagaaaggtaatcgagatttgacaaggcacctgaaaaggagtagagtacttcctgaagtcgtgatctctaaagtaatcctgcgattcaatatttcaatcgatattgtttaagagaaaacttttcacaagctcatttttggtattgacataattatcacttttgatatcattaattcaccgatccgaatagaactttccgtttccaaggagggtggtagatggagaaagaccttcagaatttccatttggagatcttgagttcccacgaaaaatgtaacccctatttccacctggcctctaagcatattttaagggccttccgcaagtaaatatgcttgcaaaattagccccgatgaagccgaaccccgcgtgagggagggttgaaaaaacgaagtcgatacaaaatgtggcaaaaatcgggtctccatccaattagggcggatgggaggggttggaccgagtacgaaatggatcttttttgttccggcgggttcccttgaaggaggtggtgagagaaaagccaaaacgattaaaaaggaggtgatgcaacagtaagaggcgtttcggcatgtttgaacgtgaagtcgtggctgtattcaaacaaggtggacatctatgaaatgtcttgcaatgcagccgtaagaagggctgcaagcagaggagggaatgacgatgagtataagaaaatatgggcaaagcttaatcctggcaatggcagtagtctgtgcgatcatgcttggcaccgtctcaccaagcgcagcgctttcccccgtgtggggttattcctacgagcagttggcagccgagtggtggaaatgggcactttcaatcccggggtacgtgagcccgctatatgacgaaactggtgaatactgtggcgtggggcagcacggtgatgtgtggttcctggcgaactggtgggacgattcggttacacgtgactgctctgtacctcaaggcatgccgctctttttcccggtcgtaaactctatgtactttaacgcgccgcctaccttgtgcgaaggtagttttactgtcgcggcgatgcgcgcttacaacgcttcgaacgttaatcaggcattcaacaaatcggcctcattggatgggaaaccgctcaggatgcaacgcgaacagtccgtagtctttgcggtcaattttcttatttatggtgacgacccctattgtccggcaggcatatattcccctgccgtagatgatggctattatgtgttcctcagcccgttgacaccaggcacacacacactgaacattcacgcggagtttccggggccctgggtccaggacatcacgtataccctgactgttgtgccagtcatactgaaataaggggaagcagggcggtgacttcggtcaccccccttttgttcaatccatcagtcagagttttgacgcgcacacatttaacaatggttacggtttctgctatagatgtcctgttttcaggcaccgagaatgtttcgatatgattttcaactattcaattgaaattcctgattttcaaccgtaatcgttgaaccccagaatcgttccaaagcaagacttgtaggtgtactcgttaatcaagacttgatttgatattgtctttagaactaaatactgttcaggacgatttaaccgctgatggtgaagatgggacggccctggcgtcccatcggtcgggccttctcccatcgggtggttcttatcttcttctcatctttttccgaagcatggctatgaggaggactatgccaagcaggggggattttcctcctccattggggtcatccatatcgtcttcaatccgcttgaggaagttcttcagatcttcatcggcagggaacttctccagacctttttgaagaacttgtcttgcttcctgacgccagccaatttcgtaaaatgctactgctgcgttgtaatacaggatcgaatcttgatccgggaagattctgagcccttcgaccgcaacttcgacggcttctttctgcatccggaatcccagatacgcacagcagagtccactgaaaatacagagacccggatacaccgttgggttacgcttccagatctccatggctttctgataagaccgaagtgcatcctccatataccctgtctctaacgcacaatatccccgccctgaaagataccttgggtcttcggggtatttctcgacaagatcttgcatgatttcgagtgcgtcttgatgagaccccaattgcatcaaaacatgggcttcattgaaaagcataactggattatccggggcaaacctgagcgcagtctcgtaacatttcaacgcttcaacggcatctcccgtatgatcgtagaatgtgcccattccggcccagagcatagcagactccggatacttgtttaatgccttttccagaagcctccgggcttcatcgtagcgcctcatctccgtcaaagctcgggacatgccgatgtatttatccttcgcatgagtgcgccacgggattaatctataaagggctaagccttcttcatactttccgaagtcgagaaaactccaggcgaccttctctctcaggtcatcgatagatttcttgagttcgctctttcttactccgggttggacatgctttaattcttcgagggccttcagatacgttgtcgttaacgcttttaactgcaccgcttcaaccccttctcccgtttcttcgatatccatagtgcctccctacccggctgtttctttgaccgttttgttgatgattaacacgtatgcataattcatatacctgtttattatatattactataataaacatcgatttccgtcctctaaatggcctgttttacggggttttctacccccgaatttcgcagggttttaaaaacactggccggagaagcccttatcacctttccgatctgccgcagggacaatccttttcctctcatttcctggatctcctccacgttcaggtccagccttttgggcctgcccaggattatgccggcttccttcgctcgttttaaacctgccctgaccctctccatcaggatatttcgttcgagttcgcctatggcagcaatgataacgaaaaccgcttttcccaatggcgaagcggtatcgatgccctcttggaaggaaacaaattcaacgcccaaatgtctgaactcttcgagggccgtaatcaggtgtttagtgcttcgggcaaatctatcgaatctccaacatatgacggcatcgaactttcgctttcgagcgtcctgcattaattcatccagggaaggtcttcggtctttggttcctgagatcccttggtcgctgtattctcggtaaatctcaaaacctcgttgttcacaatatcgccgaagatccgcaacctgcatttctactgattggtcctgggtggaaaccctggaatatagcgctactttcatctcattttcctccgtttatttactgtttaattgaggtttaaccactggtatttccttcccttatattcggataagctatttttcggtttccgtatctttttcaattatcgccaaagggaggaggtccatattcatctcctccggcctttctatcccgaactcctttaggacctcctccttcttctcatcgaccaaatcgctaaacattatctttactaccatcttttacctccgccgttcctgccgcttttttcgcccgaatcgtaatccaggctttcttagccgccgccgaccgatcccaagtcttcgctttcttcactgtctccgctttctccaccttcttcaccgtcttcgtcatcttctctgttttctggtccttcttctcgtttttcttcatacattttcctcctttccgtttttggtcgtcctcacccatttttttacctccttcttaaccacgacacctcccttcatctcgattcccattccctaaaaacaagaaaagagcctttcggctccttctgtcccctgacccttcgcaatggttctgcgttttttcggtttaacgacccgcaattccctcataaaacgtctataaactttcaaggcatatgaagcattaacatacgctcttataatatactactgtgcagtaattgtcaagtgaaaaatagcgttttttaggccgcattgttgaataaatacccttatgatatcaaccggttaaaatggtttatcgggggctacatgcaaggactcggaataaagaggatgcaggcgggcgaaacccaacctaaaagttgctttaaccaggttttcgcgctctcaagcgggaatcctggatgactcgaccaatcccaaaagcagggaggggtcagatcgtcgccgataaactaatcaacccaagccatttcttcgcttcactaatatctcgactgctgagaggaataccgcctttacatgagttcacgaatcgtcgttgtagcatttagaagcgctcatagcctgtccaatttattctacgaccatcgtctgcaagtacaagcgtaccagcgaactccttcatcctgttctctttaaagagtactccgattaccttcgtcgataaaatatgatggcacaaggatagcaggacaacagcatctacctcatactttctctgcattgcaggatgccaaatgccctttctactcaaggtgtggtgatgtaaaaagccccgcacatctatcaaatgctctactatttgctcattcgtcttcttcaagaaattctgggtaaactctgcgagtagatcaggatgtgattgaatgcggggatcaatgtcctttctaatatgatcaagtccactcatcatctctgatgaagagcaaaactcagagtggatttgcgcctttttgaatttcccattaccgtagagcgtttcaagaacaaagtacaagtcataaatagcgtcaatgaatctatcctccaatgcgtccaaacggccacggcggtaaaaattcataggtatctctaaatctcgaagatctggcacagcgaggaccgagcggattatcaaatccatgtgagcctgcggtatcctgtcaggcgactgtgcgcttcttgatgtagaaaacgaaaacatttggagggtttccttttcgaggtcagtctctggtatccattcaacagtgctgttgtctacattgatttccctgactccccaaatgcataaagccccttccatggttctaacgtctgagacgagatcctcccaaaaaggatctgggggtattaatatagaagcttttatcttcccatccttcaactgggtaatgctggggagagcactgtcaggaaaatttgaaatcgtcacgaataaatctgttatgaatcctttgtgggacctaaattcaaaggtttgatttcccttttcgaatcttacggtatgggggaatttgacatcacccttgataggaaaaatatatttacatttcacttcatatctccttggttagttcagctcatagtccctccgattgcctaatcaggctttcgagtcccaggtcaatgacttcgtgaagcaatgttatcctttctgcgatcttgtccctcgattctatttttacgctctcgtcaaggcatctgtctcttaccaaacgagcaaagagagcaatgtcggaaaggagaagcgtccgtcctccggggtcaagtgcttcggggatggcccagacctgcccctatcctatggaatcgagggggcaaagtcaatggattttttaggaaacgtggggaggggtaggatctgtccttggtgcttcagagacctcatcctgtcgaggacggtgggatgacaagttcccctgagtggccggagttaagtcaagcgttccacaggaaggagaggaaggtttttatccatcatattccatttccggtgaaaagcgtcaatttctaccttttattcgacgcttttcagttttcatccctatagaaaagtattttgaaaaccgtcaccaagtggttatatttatttgattttacgcttttcatcaatattattttaaaggaatgatgaaaagcgttgatcctcttctttggaccaacgcttttcaaatatattccctataaggtgaaaactgaaaaccgttaatctcatccctgggagagacgatagatattctttttcaccttccccactttcacctcttcgctacggaattccttcccatcgtgatcagatagaatccttcttatggttgattcggattcatcgtatcctttttcgtgagcagctttcgtgatctccttaacgtccagcccatccttctcactcaagatctctttcaccacgtcaagaatctcatctcccatcctaccttggtagacaacaccagtgaccttatctcggtccgtaacctcatcatggtcaatgaccattttcaggttaatgggtttgaattcctcgacccgtgtcttg

SEQ ID NO: 119 - DNA, 12800 bp, Artificial Sequence
  Synthetic
tccccgaagataaggactttcctgccgttttagtcaccggagaatggacgctcggccgcacccttcgctttgcaaaggtggtggaggtcaccgttttagtcaccggagaatggacgctcggccgcacctgtggactggcagaatgtgcatgggtattgttttagtcaccggagaatggacgctcggccgcacccgtcgcaatcaacgcgggtgacctggagttgttttagtcaccggagaatggacgctcggccgcacccctgatagcggtagtagcgataattggtgtgttttagtcaccggagaatggacgctcggccgcacccttgcctggcgccagatcacatgctctggcgttttagtcaccggagaatggacgctcggccgcacccctggcaagagtggaaactgagccgttacagttttagtcaccggagaatggacgctcggccgcacctgccaagccttgccctgccacgccgcgcctgttttagtcaccggagaatggacgctcggccgcaccccagttgccattacggtctttgcggagcgtgttttagtcaccggagaatggacgctcggccgcacctgcaagtcgtcgtcaacgcaaaggacatagttttagtcaccggagaatggacgctcggccgcaccgccgcggtggccggcgctcgatccggagctgttttagtcaccggagaatggacgctcggccgcaccttgtatgaggatattgaggaaagatgatgtgttttagtcaccggagaatggacgctcggccgcaccgaatgaagggtcacagtgaggtgttccttggttttagtcaccggagaatggacgctcggccgcaccagccgaagccttaccgtgaactgtggatgcgttttagtcaccggagaatggacgctcggccgcacccgaacgccctatcaagtgtggcttgagaagttttagtcaccggagaatggacgctcggccgcaccccgtcagaagagcggtatcgcggccaaagtgttttagtcaccggagaatggacgctcggccgcaccccagcaactgctcggcacagtctcaagcccgttttagtcaccggagaatggacgctcggccgcaccccatgtgcagtaaccaatttgccagtggggagttgctgcaaaaaacgcgcacaaaaaccgctgcttgccgggcaaaaatcccgcggccaagtgcggtttttttccacttcaggcgttttcggcgattgcggccggcccaatggttcaacttgtcgaggcccgcagccttgattgtcagggcaaaacagcgacatgtccgttacgctaacgatcgaccctggttcgcggaacatcgggctggcgctggtgcgaagccgtgctggcgaccgaccgtcggccctctatgcagcctgcatcgtcgccgagcctaagcccttgaaggagttggtggttcgccgtgcgcaactgcggcggatgcgacgtactcgcaaaacacgccgccgtcgtttgcgccggctggccgatgccttgcggggcatcgccggtgcggaggcgatagtgcgcttctgtcgtcgccggggctattcgcacgatccgaaacgggcgcgcgacggccgcggcgccgacgactcgaccggcgcggacaagctattgtttaacgtctcgcgggaggacttcttcaaggcgctggaagccgaggtgcagcgcgtgattgccgagccggaccgccagcgcgtgctggccgcctgccgccggcacctcaacgctgcgcggctgcctggcagggaattgcgcccgccgcggttcgacaaccgcgcagtgggccgatgccgctggcaagactgcccgcgtcggccgcggcggagggcaaatgccgttgaggagaatctgcggcagacgctctacgaatggctgaagccggtcttcggtgaagcgctggcagggctcgaacaggccgaggctgccaaggccaagagccaaatgtgcgccgagctcgatcactggtgcagcctgctggcaaagctggccgccgagtaccgcaagctggccgacgaacagcccgaccagcgcgacgaaaaggccatcaaaaaggttagcgccctgctggagcgcagaaagaacgagctgtaccagaagatcgtcgactgggcgcaggagaatgcgcccgccaaggcgggcagaaagttcgccgaggattttgaagcctactgcgacaaaaagcgcagcaagggcaagcagaagtgggaaggtgtttcggccgctggcgcgacgcaagcgggcgccgtcgggcagaaaaagaagaagaaaaagaaaaaacgcggattcggcaatcagctcgatgatatcgtggtcaagggccgggccggtcgcttgcaatactgccgcgagcacacggagcagtacatccagtatttcctcgaaggcaaaccaattcccaaccgggaagacgttctggaccgcgacatccgcagtcggcggcagaagatcgtcttcgaccggctttgggcgctgatccgcggccgattgctcccgctggccggcggacgcatcgaccggattgtggtagagcgggtggccttcgacgtgctggccggcaccttcgcggactgccaggagctattcagaactgacgaggagaaagcggccgagatgtactggttcgggccgcgccacggcttcaagaacgagctggagatgctccgcacagagttcgcggggcgctgcgcgtactgcggccagcaatttcaagacctggaggtagagcacatcctgccccggagccgctttcccttcgattcatatctggtcaaggtgccggcctgccgccaatgcaacatgaaaaaaggcggccgttcgatcctggaagcccaaatgcgcatccaccccgatgcgtacgacgcatacgagcaatacctggaaaaacgcgaggtgcgacattacttttgcgacatcaaaaaaggtgtgctcaagctgctgaccaacggcgcccagaactggggtttcgagcggttgctgggaatgatcgcccataacattttcgaacagggcaagtcgcagaacgcgccgcgtgcattggggcgctggctggccggaaagctggagcgcgaaactggcgtgcggccgaaggttgtcttcctcagcggccgccatacggctgcttggcgccagcaagtcctgccggactacgaaaaggcggctgaaaaggccgagggcaaaaagcgcaaccacgcggtggacgcgatcttgctgggctgcgatttccctccggtggcattcctcgatagccagcgaaagtggtggctttcggaggaccgcttgcgccgttgggaagaacaggtcaaggccgccgcaccggaactggcagaccttgcaggcgacggcgatgctgcgccggcaagactgccgcgggtcgaagcgccgccgccgatccggttcttcgaggaggaccttggcggcgggtatttcaaaatcgatctgtcggcctttggctggaatcggcgccggcaaagcggcgcaaaggttgacccggtgcggatgatcacaaccgcaaacgggaaacttgttgccaagcgcgagcctgcgcaagcggtactgaaagatttgctggcagagaaacagcgcgataagcgcatcaagttaatcgccaaccggcgcctgcgccaattgctccagagcgatccggccaacgccgcccggaattacgtcctgtggcttcagcggcagaccgccagaggactgcgcgcggccaagatgggcaatcacccggcggacacaaagcggcgcgaaatgctcgagcagttcatcaacacgccggttgatgatttcctgcggcccagcaagaggcggactgccaagaaggcccagcagcagacgcaatccagcgatgggcgaggcaacggtcagtccgcagccgaacagacatcggcggcagaaattcccgcgatcatcggcgtgtgttgcctgatcgcccagaagtacactaaatacgacgtgccgcgctgcgaccgcaacggcaagccgctgcactactacgctagccagccggcaatacgcgcattgtacgtcggatacaaacgccgcaaagacggaagactggatcgttccaagccggagattttccgcgtcaaccaggtttggaaggtttactacggcccgccaggcaaggaccaagacagccccaaggcacgcaaggtcatcgagaaacttggacaggacagtccgctgcacggacgcatgctcggccagcgtggctcctggcaggagttccgcaagcgatggcacgaggcattcggcagactatgggccgacttgggcgtggagaagcgtttccagattgcgcagggcgcggtgatcgaaaagaccgacggcacatgtttcctggttcggaacttcgataacaccgagggttggatgagaggttctccctggaaggacatccgccgcgtatatcgctcgccgttgcactacctgtccgccaaggccaaggcggcattcgatcactcgtctcggagcgccgcaaccgttgccgaaactatcaactagcccgtaaaggtcgaagcggtttgcggcacgtcggcaacggcgcagcccaaatcgccataacggcgtagcaggcaaaccgattggtctttgtgcgcaatcagtgcgggattatacttttcagcctcatgcagtgtcttacggggtatcaggttgcgagccgtgcgcgcatgttgtagggcatcctgccgtgccacgtgctgtcgtggccgtatttggcgctggttattcgacagccatcgacggaaacacaacccctacacccggccactaactaacgagtggcacagggtaataatggtatagagtggatttgcgctgtctggtacccgcgcggggcgagagccgagtcgctggtaatcggcaatccagccgctaaactgtatcatgacaggccggaaaataccgggggacgccgactacgaagatcccgctcaacactgtcggataccacggtcgatcggtcgtgtaaccgggaaaacggaaggagttcctcgtgccccataaagagttgaaaaacaagcctctggtagaggccatcttggaagtaagatggcgcctgcaacagcctaccaacgagcaacttccggcacagttgatattaccggcacgggacccccattaccggctcttgctcgggcgcctgttcgaccgcattcaaaaggaataccctttccacgaagagttgccgacggcatctttgccggacgacatgctagcgcacgtcgtgcagcatcgatttcgctcggccaaggacgattggccgctgatacaggtcgggcccggggtgttcaccgtcaacgacactcatcgctatacgtggagcgactttcaaaagcgaagcaaagaggcggtagcgcggttgtacgatgcccaccctgccgtcgctgattttcgcgttgagagcctgatgctccgttacatcgacgcggtggagtacaattacaaggatgaggatgctttccgcttcctcggcgacaaattgaaggtaggcattagcttgcccgagactctcttccaggatacgggcgtggaaaggcgtccgcacagtttcttctggcaggcgactttccggtgctccaggccggccggtaggctcagtgtgagctttgcgacaggtcagaaggaaggaaagccggcaattctctgggaaactacggtacaatcggtcggcgaggacctgccgagtatgcccgacggattccccgcttgggtcgacgcggcccacgaaatcaccaacgattggttcttcaagctcatcgagggcgaactcgaaaggaggttccagggtgagtagcaccgcgcacatctgttacgagcggcccctaagtggagagatccctcaaggatcggccaaatgggctttcgacgatggtacgcacagcctcttcgacttccgggtaaggcccgcaagccggcggcttggccatttcgcgcgattggcactcctcttggccatgtcgtccatgagttccgctcaagacccgtgggtgttgaacaggcagcaacattccatatccagcaccggtacgacattccagactagcactcgccggcggataactatgcgcgaagccctgaaaatggctgacgacatcatgcgacgggcggaagaaggccgcttgaaagcgtccgaggaagaggcaaagcgtggattcgactgggagaacttcacgtgatctacgagtttcccaaggatgaggacccgatcagacaaggagacattttcgtcggtctcccccgtgtcgaaatctcgctgaatcggattgcgctggttgacgagcagggtttctatgacgcctcgtggagggaagttgcctttgcaggcagcccagtcaaagctatcctgccggtccggccggtcagtgcgatcgttatcagccaggattgcgacaccatccattcccaggacatctcgttgtgcgaaatccgtgagtttcgggcagtggaaggaaaggcgaaacaaacgaaggacgccaaaggttgggtgagcatcttgactcaacatgcccgcgtaaatttgaagtggttctatttacctccggacaagcggcttggttttgaggacaagatggccgtggatttcacgataactttgcgtgtgccgcgcgtcgacttggaatatctccgcggctttcgcaaggggcgactaaatcccaccgccgacgaacacttccgcgagaggctgtcggaattcttccgccgttatccctacgacgaatggtatccgttggatcaagcggaactagccgagtatcgtaagaagtatcccgaggcacaacctttcccctggcaagacttcgattctccgaaatgatttgtcgtgcgagaacaggaagccttcggcaagcgtttgatacggcgcagcaggcaagccggaggcacacaggcaagccgattggtctttgtgcgcaatcggggcggggttatacttttcagcctcacgtagtgtccttatgggctatgatatgggcattgtgcgcgcatgttgcagggcaacttgcaggaccacgcttttgttgcacggcaacttggagcgctatgccttgttgcacggcaacattgaggggtatgctttttttgcacggcaacatggaaggccccgctcggtcgtggccgtgtgccccggtgccgacggacgctaccgtgacgcgttactccgtaccggccgattaattgcggctggaggccgcgtcaggggtttagcaaagtgcgatgttcgcgcccgcagcgatcggcagcccgccgctaaacaccaaccgtggccttttcagccgcaacgtaacagattgtaccaattgactttgtgtcttggtgtcttggtggtgcgattgccgcttgggcacgtgtagggaagggaaatcggcatgggcatggaagccgctgcgttaccggtagtcagcgccggtaccttcgagcagcttcgcacggcacggcaagttctgttgcgggaaagcgaagcgctggcggagcttgccaatcggttgggagaggagttttgtcgcgcggtcgagctgctgcaaaactgccggggcaaagttgtcgtggcgggcatgggcaaggcggggctgatcggccgcaagatagctgccacgcttgcctcaaccggcactccttcccattttctccatcctgccgaggcgctacacggtgacctgggatgcatccggcagggggatgtcgcactgttgctatcgcagagcggtcaaacacaagagattctgcggctgctgccctgtctggccgagctgggcacgccgatcatcgccataaccggttgtgccgcaagcagtttgggtcgagcggccacggtgacgctggaaatcggcccgatccaggaagccgatccgctggggctggccccgacgaccagcactaccgcgatgcttgcactgggcgatgcgctggcgatcgtggctgcccaattgcgcaacttcggacgagaggacttcgcccggttccaccccggtggaactttgggacaaaggctggccaaagtggaagaggccatgcgcccgctggagcagtgtcggctggcgcacgaggggctttcggtacgggaagtgcttgtcagcacccgcttgcccggccgacgcacaggggccaccatgctggtggacgattccggccgactgagcggcatttttaccgacagcgatctggcccggctgttcgaacagcgtcgggaaagccttttggacagcccgatccgggtggtgatgacccgtagtccactgtgcgtacagcaggggacgatgatgagcgaggccatcgagttgatggcccgacgcaagatcagcgaactaccggttgtcgacgcccaaggccgaccggtgggactgatcgacataaccgatgtagtcggtctgttgccaaaagatcgcccagagcaccaagtttgcccggccgataccgcatgtaacgcagctagcgaccaagaaggtacgtcgggaataatgcctgcggtttatcgcatctacgatgaaccggccaacggtcagccagcgtaatcggtgttgttagatgttctatggagccatcgcggtttcgggttgtgccattggggtggcgacttggcgtgctatcgacgaagcgctgctcgctgtgcgctccaccgggcgaccgccggccgcgaggcgcttggccgaatgggctggacggccagccaatcgccttgccagatcgttgcgcatcggtcgatagaccggccgttgctgtgtgaaccaagcgggcagtagagctggccgatccagttcgcgcgggcagcagcagaaggcgttcgggggaaagacgtctcgcttcggctcgcgcaaagcatagttcctgtcattgttgatgatatccagcaggccgaaactgccgtttgcttcccgcacggtcaagctggccgtcagtttcgcggtgctgctatcgctttactggctgtacgcgttggtggcggtgccgctgatcgagccgtcggcagagccacatcgggcgctggcgcagtcgggcggccagatcgccggcgaagacccgcggctagaggaattgcgcccgctgtttcccgccgacgcctgggaactgcaatcacccaagattatcgaaagcgaccagctcaagctgctgatgcaggaaccgcgaagcctgggcgaacgcagggttcagttgcgtccctgcactatgatattcctgcccaacaaagcggggctgagttaccaggagcgcctcagacaggcagtggtgctgcaatcgcccgagggcgccatactggagttcgatcaaccgctgaacttgcgccggatggaaatggggcgactggtaggcggagaacttaccggcccaattaccatccgtagccaagggcaatcgcccgggccggaagacgatctgctgatcgtgacccgcaatgtgcagatcaacgagaaggaaatctcgactgtaggacgggtggagttccggtgggggcctcacttcgggagcggacaacacctggtaatgaagcttgccccagccaccggcgatgcaccacgacggggagcgaacatcggcggcctggaatcgttcgaggttcgccatgtagaacgcttgcacctggaagtagtcgactggcctggtcaaaagccggcggaaagcccgcgccagcaaccgcgcacggccactccgatcgagatcacctgccgtgggccgctgcgtttcgatccggtccgcaaggaagcgactcttgaagaccgggtgacggtatggagcatgggccagcgcggcccggacaaccaattgacgtgcgacttgctggtactggtgcttggcgatcagaccgacggccgtccgcagcaacagcagcagccacaacagcgctcggccagcagcgcccctggtggcgtggaagccggccagccgcaagaccgcggcgatcgcctgtcgctaagcctgcggcggattgtggcacagggcactcccgctgtagcgatggttcccagccgtcagcttgccattcgcgccggcaggcttcaatacgatctgctgtcacagcggatcaccctggcgggggagccggaagtgatgcttcgtcaaggccccaacgaagtgcgtgcgcgcaacctggtctatgagtcggcgggggccgagaagctggggcgacttttcgccgaaggcccgggttggctcagagcacagttgcccgatcggcccgaccagcagctttatgcccaatggaacgagcaccttcgctttcggccacacgagcagaatcaattgctttcgctgaccggcggggcaaggttgcggtttcgtggagtgggcgaagtggcggccaaagagattcacttctggttcacggaaacccctgcgccgagtccggcggctgctgtgccgactgtggcgcacggggcgcccaaaacggcgcctactgctttggcacgcgccgcagcagcaccgctggcccaatcgcaccgccagacaatccggctgcgtcccgaccggatgctcgcccaacacggcgtggtgctcgactcgcagcaggtgactgctcggctggagcagttgggggtttggttcgagccgagacctttggcagagcggctttcgccgggcgcagccggtggacatggcagcggccccggacctgtgagttcgtcttcccataacgaatcccagccggcggccctgatccccgatgccgccgcgggccgcaatgcgccctctgcgctgccggcggctgacagcgtggcgggcagcctgtccgtcgccgaggctggcacaagccctctgtcggcaacgggcttgcgcggattgctggcagaaccccgtcggcgattcgaagcgcaaggccgctcgctgcgggccagagttctgttggacgaggatatcggcgagcataataccggccagtcagcaccgcaggcagaaacccagaatctttctcaacaaagccctggcgccgaaatcgccgagttgattctcgaagacgacgcaaggttcgtggaactgcttggcgaaggagcgtccgtcccgccggtggtcgtcagcggccagcgcatacacgtcgtcgaggccagcaggccgcacgctgcaataaccgtggtcggccggccggccttgttcgagggacgcggtttgaaactcagcggcgggaacatcaatctgaatcggggcactaaccggctgtgggtcgatggacctggcgaattgcaactgccgttgaagcgaaatctggactttccgctcaaacaacctctggagccccagccgccggcgcaacccggcacgctgcgcatcgattggcggcagcggatgcagttcgatgggcgatcggcgctgctggagcagtcggtcacggcgcgcggcccggacatggtcctctccaccgaagtactggaagtgcagttgcagcaggggatagttttcgccgagtccggccaagactcccagccacagatcgaacaaatactttgccggggcggggtgacgatcgaaagtcgccgtctgcgggatttggaattggcatcgctgatgcgcgccaggctggccgatctggcatggcacatccccagcggtgcgattgccggcggcggaccggggttcatggtgggagtgttccgtagcaccggcccggcgaaacccccgaaccttgtgctgccgtttgccaagccgcggtcgccagaagctgcggccgcacaaggccgctcgggcgctccgctggattgcctgcacgtgcgattccaaggctcggttcggggaaacaccaacaccggcacgctggggttctacgaccgtgtgcaggctgctttcgcaccagtagcttcctgggatgctacgctggaagtggatgacccgcgagccttggggcaatatggcggtctgctgatcaactccagttgtctgacggtgaccgaaatgcccagcccgcccggcaaccagcgaaccgttgagctggaggcgaccggcaacaccatcgtggaagcggtcagcgaagaccagcgcctttacaccgcccgtgcccagcgaatcgcttatgcccaggcaaaagacttgcttgtgctggaaggcgacgggcgcacagacgccgagctgttttatcaaccacaacccgcagcgcagccctcgcgccaagctgcgcgcagaatcatcttgtttccacgttcgggcaaaggttgggtcgagggggcgcgcagcctggaactgaccggctttccccagtgattgtgcgtgcaagtgccagccgctctgcggctggccagttgttgcgacccatcgccggcgcagcgttgcatcgcaacagggccataacgcagcccgcggccgcaaccaaatggcagcgacgcgctgcggttgcgtccgctagcaatgggaccacggccacgacggagcgtggccctccagatcactcgaaaacatgcgcgcaaaatgagcacaggttacgtcgtaaggaactaacacccaacgacgcccgacgaacctctgcgtcgaactgcttgccatggcggggacaacaacggcattggcggttggaaatcaaggcagttgcgatgtaatggacgacaaccgcgatgaggttggaaatgcagggtttcttctctctaccggtgtatcaagtacaattattgccactggggcggaataaccgggaaaccggtcggcacccgcgcagcccgaacgaatcggttagcaatacaccgtgcttgtagcagtggagcttcttggaagccagaacggctcagttcggcctgcgcgaagcatatcgtacgaaagtcccgcgtgcggacctggccgattccggctacagtt

SEQ ID NO: 120 - DNA, 11185 bp, Artificial Sequence
  Synthetic
  misc_feature (5738)..(5769): n is a, c, g, or t
tttaaggttaaattataagaaaccgtcgcgaccgttgcctatcatttcaggaatcccgcctcctgcaggatttctctggcgcgcggaacttgatcttgctgaatcagcaggcgggcataagctcccgcggcaaccagcatcgcggagttttcgccctgaaagaaatagtggatgtcttcaccatccagcacggatttgataaacgcgatgtcgccgggattgtacgtggaaaaaacctcgatcatctccacatagcgcacatccccgtcttctgaatccgatgtaatgttttccatgaagcgatgatacacaaaaaaggattattatggaacaccttaaagggtcgcaacgaaaatatctgcgggcgcaggcgcatcatttgaagccgctggtcatgatcggcgcaaaaggcgtaacggaacagttgcttggctccgtggatctggcgctcacagaccatgagctgatcaagatcaaattcggcgaattcaaagaagccaaaaaagaaataaccgccgaaatcgcgctggccacgcatagcgaaatgatcggtctcattggcaatatcgcgattctttaccggcaacatcccgatttggaaaaaaggaaaatcaggataccgtaaagctcgctctgtctgtcgaaaaaccgtgcttgccggttaatgccggccacggagagtattaaaatttattgacatcagaaatcacattatatatagaccctgctcgcaggccgtgtgcattatccaggatcggccgcgcaacgctcattcttgatggggaatcgttcaatggtaggacgccggactctgactccgttaatcaaggttcgaatccttgttccccagccaaataaaatcaaagacttagaagacataaatttttgaacaccgttaccctccttaaatttttaccgctattttaccgcttttaggcaccgttgttggtaaatttcctcctactttaatggcatgatcttgccacaaaattgagtcatcaacgtacaatcatttattaaaattaggaccgatatttagcaagaaataagggcaattatacagttatagcagatagttattgctattggctcaaggctgttagggtcttgattgtggggccatagggccacaatccgcgcatgaagcgccatgcatcacggcaacatggcaacattctcaagtctgcatttatcaattttattttccccgcggctgtggtatagataaatttgtcttagatttaaattacatatcatattcaacgtaaatatttccttgcatctggttagctcatggagaatatcttgcaaactggaagaacttatacactcggcatcgattatggtgcgtccaatgttggcattgcccttgtctgtaatgaacctactggagaaaaccttccactgtttgccgccacacttaggcttgatgcgcgtgatctcaaggaaaaagttgaaacccgtgcaggcatccgcagccttcgccgcaccaagaaaaccaagaagcaccgactgcatgatcttgcagacgcgttaaagtccattggtcttcctgaaagacaggtgcaatccgttattcgtttcagtaagcgccggggttacaaatcgctttttgatgaagatctgcatgatgaaacagaggagcagcaggataccgactttgtttaccgtttctcacgcgaagtatttttccagtccctgagcagcgaacttgaaaacatcatagcagatccagttttgcgattaaatacattagcgcaatgcgaacgaatcctgaacaagcaaggaaaccctgaccacgaaatccgtcggatcagaatcgacaaccggggggcaagccgctgcgcttgggcgggctgtaaccgcgtaacgccgcgttcggataatgcgatcagggatgtgctcgcccagcagctttacaactatttccaggccctcctgcgtgacaatccatcacaatcagccaaagttgaagacgttattcaagaactggtagttattgccaagagaatccgtgccgcttcaggagaccatatcaaagaggaaaaaaaggcgctcaggaaaagggccagaggggcactgagaggtctgaacaagttgctcatgcccgttgccaccggcatccccgaagacgagccctgggaatacgtcgaaaagggaatgatgaacaccatcgagagacgcgcaggccgaaaccgttactgtcgcgagcacagcgccgaatatgtccagacaattcttgccggcaaggctgtccctttcaagaaaacgatcactgacgctgatattatttcccgacgtgagcagatggcctattccaagctgtggcgttacatcgaagctcgcatattaccattggcaccgcagggaattgatcgaattgttgttgaaaggacggcgttcgatctcctcgccggaagctggaagaccatccagggcgcaacagataagtacaaggaagaaatgtatcagcagggccccatgtttggtttttcatccaagagggagatgctcaacgaagaattcggtggactttgcgcttattgcggaaagccgtccgcggatctgatggatcatgatcatattatgcctagggcggacttcttctttgacggatacctgaacattctccctgcgtgcccgacctgcaacaccaacctgaagggaaaacgggcgttatccgaccaggcgctgaccatcgtacccgaggcctatgaagcttacaaaaaatatctggcaacgaaattccggacccgtccgatgcatttcctgcacaccgtaaaaaagggcattctcaatctgatgaaggaccccgatcgcatctgggaagcggaaaaatacctctccatcgtagccaggcaatatgcgcagatcgtccaaacgcagagaagccccaggccttttgcgaggctattgtgccgcaaaattaaagaatcgcagggttctgaaccctccattgcttttcgaagcggccgccacagcgccctgtatcgccagattgcctaccccgaatttgaaaaatatgcagacaaagaacaggggaacgtcatcaaccatggccttgacgccattctccttgcttccagcctaccggacctttaccctgtggaatcgctgaacatcccaatagcaagactaaagggctggaccgcctctgtcagaaaaagagcaccaagacccggttccgacgggattcccgccatatctgtaaaaggcatggttgatggctttgaaaagatccatgcacccggatatatcgaagtagaagtccgggcaatggtctggaacaagaaaaacagcaggactcacaagcaagacccatatggctggtctgaatcgcaccacatgcctacaaagcgtaaggcggctgccgacctctatgcggatatgacgaaagaaaacagcccgacaagactcaaggccatggtggaaagaatttaccatccggccctgaaacacttcattttgggaaggatggacacggacaaaccggggcaatccgctgcggcggcgctgaaagaatggttacaggcatccatcagaaatagcctcccggattcacaattctccaatcatccgggcgatcaggcccgcaaggctgatctggaaatgtttgccgaagttccggcagcaccgatacccgctatcatcggcgttaagatgatcgacacaggcgtgcaggggaagatcgatctggagagaatggaccacaaaaccggtcggattgtgcatcgctatatgactgatcctccgaataaagcggtttatgtggcctatcctaaaaaacgtgatggtggttcggacatgacgaaaccatgcctgcttttcctgcgtcagaacgacgctattatagtcgaaagccttgccgcatttaggccgctgccggaggaacttgccaggggccgtgtattgggcagcacacaaagcaaaatttttgatgctgcactattggagaaataccttgaagaatgcgggttccattgctatataagattaacgtccggctgcgtgatcaactatgaggacggaaaacgctggttcgttcgcaactttgatcagagcaaggatttcaagaaggcaagattgagaaacatcaagggcgttcagaagacacctttcagcaggcgcatcgaacctcttgtgtatttgggcaaatgatatttgtccatgacaggttctttgacaatttagaattaataatcagttccggttgaaaagagcatccgccggacagcgcactccgggatcgggcagtcccggcacttgcagtttccccggttagtccctcggaaacaagccgtccggcatgtcgaaagacaggatgtgagcccattaaaaaatgaaagtcattatgatattcaattaaactgatttcagacagtcgttgcgacctttaagagtttcttttccaggtcatctagaccggtttcaattaaactgatttcagacagtcgttgcgacaaaatggttattcagcctcagcattctccacggggtttcaattaaactgatttcagacagtcgttgcgacgtgtgtcaacccattacgccctgaaacgtggccggtttcaattaaactgatttcagacagtcgttgcgaccatatcgcctgtgcatctcgatcagcgccgcctcgtttcaattaaactgatttcagacagtcgttgcgactcctcaaacggtcgtctctcagccatacctcaatgtttcaattaaactgatttcagacagtcgttgcgacatgaagggggctttttatgattgattcacgatgggtttcaattaaactgatttcagacagtcgttgcgacgtggaacctataccagggaggcatagcactaaggtttcaattaaactgatttcagacagtcgttgcgacatcatctttttcatcaatagtaatgatattcttagtttcaattaaactgatttcagacagtcgttgcgacacattactgtgataaatggtatccagacgggttgtttcaattaaactgatttcagacagtcgttgcgacctaacggcggcgcggcacaagtcattgagaccgtgtttcaattaaactgatttcagacagtcgttgcgacaacagatttgacgattaccgatgcctatggcattgtttcaattaaactgatttcagacagtcgttgcgacgtctccgatagtaggaacagttacagtgtagccgtttcaattaaactgatttcagacagtcgttgcgactgttgttctaaattgtcaaagcatttcaattatttttatatgcatttccgcgaaactcccacagagaggggattgttgcgctgtaaccacagttaatcatcgttcattttagaatctaacataccaatatcaaaaggtttttaattttccgcgaacccctgaatcccataatttacaaccccaagcgaggatgttcagcaatgagcgaagcggcacggtggaaattgatctattaataaaagcttccacatatgcattccatctcttccaatctcgccgagcacaccgggcaggatgcggttaaccgcgtcaggaaactttacggcgtaattgcggaggtcatggttattaccgtcgatggcgacatgggccacgttgaattccgggacgcgacgccggataagcacagggaagccatggaaaaactccgcgctggaatccgggaggcgcagcagggtcagcttgcaaaggccgtgaacctcttcaaggaagtccttgccgttgtgccgnnnnnnnnnnnnnnnnnnnnnnnnnnnnnnnntagcaagtttgtggatattaactttctaaaattgaacaaatattcaattaatgcttgctttttgcataatatatgcaataatcactacaaaattagattatgaaatggagaacgttatgttaattgaatttaacgttaccaactaccgttctatccgaaataagcaaacgtttagcatggcagccagtaaatattatactgaattgggagaaacaaattgttttgatatcgatgtttctggattgccgaaacttctccggtcatctgtagtctatggaccgaatgcagcgggcaagagtaacttatttcgcgccctccatttgatgcaaaagttcgttcttaaatctcattcgcagcaggaaggccaggtaatcaacgccgtgcctttcgaattagataaactatcaaaagaacaaccaagtgaatttgagattttttttgtgcaggataatatccgttatcaatatggatttgcggcaaacagaatgcgtgtcacgaaagaatggttgctggcctttccggaaggtaaagcacagcgctggtatgaaagagaatacgatgccaattctgacaatgagaaatggtatttcggaagcaagttcactgggcgtcgtcagctttggcaggaagcgacacgaaagaacgcgctcttcctttcaacagccattcaacttaataacgagcaactgaaacctgtattcaactggtttcagaataatcttactacggttttaccttctgatcagatcaatcttaatttatcgcttaatcaatgtgaatctgaagaaggctgccgtcgtattatggaatttttgaattccgctgatattggcattgctggaattgaaatcaaaaagatcccatttaagcccgaaatgctttcccctgatatccctcaaaaaatccgggatacgtttttgcttgaaatgaagggtaaggacttaccggatattcattttgtccataagacaaacaccggtgaatcagtaccattccgtttctctgatgaatctgacggaacacaaaggttattcgcgtttgccggcccctggctcgatgtattggccaaagggcgtgttatttttgttgatgaattaagttcaagtctgcatcctttgattgtaaggttcctgattggacttattcagaatccggaaatcaacaaacacaatgcgcagttgatcttcaccacacatgatacttccgtgcttgattccgatattttacgtcgcgaccaggtctggtttgttgaaaaagatggcgaacaggcaagcaagctttatccactgagcgattttacgccacggaaaggggaagcgctagaaaaaggctatttaaaaggtcgttacggagctttaccttttattggcgaattgaggttctaatgggaacagataatctattccacattaataaagcacgtaaagcagaatcacatcagcggaaaaaagcaagacgtgatccatacgagcgaatgctgattgtttgcgagggtaaaaaaacagaaccaaactacttcaagggtttgcgtaaaacctttggtcttaatcccatgaatgttgtcatcgcggacaaaaaacatgggcttgatccgatgagccttgtggaatatgcaattgatgagtataagaaagatcctgactacaaccatgtttattgtgtatttgaccgggacaaacaccaaacttacgatgctgcccttcacaagataagtgtttgccgcatgaaacggggtgccaaattacacccgattacttcaattccttgttttgaaatatggttgcttttgcatttcgcctatactaccagatcattttgtgcagcatgtgatgattctaatgcagatttggtcatctctgaattaaagaattatatgcctgattatgaaaaaggcgctgaaaatatttttattggtgatgagcgtttagatactgctatcaataatgcaaagctccttgaaaaattccatatgaccagtagaacggataatccatctacaaagatttatcagcttgtggaatatttaataagctacagaagtcgaaaggtttaattggacatcttgctgatgcaagtatccttgatgccgacatcaataaagaaacaaacggtatcaagcaggcctacaacatactatcaggcaaagggatagacggcctccatgacaatgccgagaaatccttccatgttggagcgacgaagattcttcacttcctgaatcctgcattatttattattgtggacagtaatgcaactcgggcattccgcgagtgccatcacgttcctttcaaaaacacaacccagccaggttatactgctgaactttatgtaaagtgtgtgcaacatgttcagcaagatattaaagatttcggtttcgacaattttcagaacctggatcccagcagcccaataacccgaatttacgataagctgacatttgctaccgggtctggatggttttgaattacggaagatgtgttgatattgaatacaatgcactgagtgaaccgacaaccccatcaattttgccttaacttaaacaaacatatcactgcacctattggctcctcggtgcatgtataattcacactcaaaacaaacatgagacgaaggcggaagctccgggcaaccggggaggcaatcgacagacgcccggaaacaacgcctccgccccctgctcaatgcatcactgcacctcgggcttctcaccatgctcaaaccgcgcctggcgggccaccttcagagcgttcttgatcggccggagaatgaacttcactgaaacattacgtcaggctccggatgccctcttttgtgccaacaattggaatttgtcatttccccacagtgatgatataaaacaaatccattgtggaaaattgcaattaaaatacgaatcattgaaagtacatgagatgaaaatatcaatccccctgaaagacatcatgattgcgccgggcaggcgattcaatcccgctgaacataccggacaggatgtgatcaagcgcatcaggaaagtttacggtgtgatcgcggaagtgatggatgttgccgtcgataacggaatggtccatatcgaattccgggacgccacgccggaaaagcaccgggaagccatgaaaaagctccgccaggggattgacgaggcgcaaaagggccagcctgcaaagtccataaaccttttcagggaagtccttgccgtgataccggaaaaccttgatgcccgtcgaaacatggcaagggcgcatctggatctgggcagcatcgagcaggccaagaagctttaccaggaagtccttcagctcaaaccagccgatcatgacgcggcaatcgccctcggcaacatctacgcccggaacgaaaacaaccctgaagtggccgcgttctattacgacctctgcctccagcaccaccccgatgacgcgatgctttcctgcaactacgccgccctgatgttccagaccggcgagttccagaaggcggaagtcctgttcaaacaggccgtcaggggcaacctgcccaacgcctactacggcctcgcgctcctctataaaatgtcagggcagccggatgccgccagaagcgtcctggagaccatgttcgcccggataccgcatgccacacttgccgggggacacgcggcgatatacgcggaggcgcagaacctgtacaacgagctggccggaggatcgaaacaatgaaggatttcaattacgcgctcatgctgatcaaggccgggaagtatgatgctgcgagggacatcttcgaggaactcctccggaacgacccgcgggacaaggacctcctctacaacctcggcatgtgccacagcgaactgggcgatcccgaaaaggccgtggcgatcctgtcggaatgcgtgaagcattatcccaattactcaaacgctcatgtcgcgctgggcttcgcccaagtcatgctcggacaggacgcgaaggcgaaggacaatttcctgagggccctggagatcgaccccgtcaattcgtacgcgctcaggaacctcggcggcctgtacgggaaggagaacaacttcgacaagtccatcgagtgccttgaaattaatgtagataaatgtgtgattttttgtgactcatgaaaactgaacctaaaaataaagagcttctttcccttcagaaagaaaatcggcatttgaagcaaagcatcgtcgtcatgcgcgaccagcttgaggggattgcccgcgaagaggctgcgcagaatacgctgcgtgccgcgcaggacgaaatgacccagcttcgggcaacgattgccgccatgcgtgatgaaatggagaaagcctgttacgaaaaggactgcattatagagcagcaggccgtcgattccagcgatgaaaacaaacagatgaaggatgcgatcacggcgctgcgcagtgaagtggatcgccgggaagccgcccatcaggaagaaattcaggtgatgaacagaaaccatcatggcgaagtgcagcagttgcagcagaccgcaaaggcgctgcgggaaaagttggtggcgctgaaaaccacgaaaccgtaaaggtctgacaaacatgaaaaaacatcagaacaaaccgggcgtaaaaaacttgagcatcaggaagatgcggtcgctgctggatatttcccggaaggtatcgactctggaaaccctggatgaaatactggcggagctgataaaaattacaaccaccgagatggatgcggaccggggaacgattttcctgaatgatccggaaacgggagaattgtattcccgggtcgctcagggaaatttccagcgggaaatccggttgctcaatgccagcggcatagcgggaacggtgtttcaaaccggtaaaagcttaattattcatgatgcttacagtgatgaccgcttcaatcagtccgtggacgccaagaccggctatgtgacgaaatccattctctgcgttccgatccgggccgcccgcaatgaaatcatcggtgttgcccaggtactgaacaagaaatcaggggagtttacggaagatgacgtgatgctcctcgaagcgattgccacgcaggcggccatcgccctgcaaagcaccatctttaccgaacggatgaaaaaattccgcaccaaggagatgaagtttttcgatgtggtcacggaggcgacatcggaaatcaatttggggaatctcctgcataaggtcatgtccgaggcgatgcggatgacggatgctgaacgctccaccctttttcttaatgatgataagaccggcgagctgtattccagaataggcgagggattggcgacaacggaaatacgctttcccaacaatgtcggcattgccggatcggtttttcaatccggcgaaaccattaatatccctcatgcctatgccgatctgcgattcaatccgtccgtagacaggaaaaccggcttc

SEQ ID NO: 121 - DNA, 9428 bp, Artificial Sequence
  Synthetic
atcgctttcccatgtcaagaatccaccgtagaatcgcccagactattttagaagacagaaacaccagagcctaggatatgggatcctttgtgcatattttccacccttccttcctgtaactttcccttccctaatctttcaaaaaggtatatattacaaaccgtaattgtaggcactttaattatccttatggggtttcttggtgggttagttgttttgtggatcgttgttttgaggtgaaagaacatgagcgatgaacaattaacaaaaataatgtatgtagtggtggctttgttggtctatttcttaccctccattctcggaaagaaacacaagaatttttcctccatcttcgtaatcaatttatttttgggatggacacttattggatgggtggtagccttggcgtgggctgtgaagaaagattgagttattgctttcaggatcgctctggatctcccccgagtcaatctcaaatcccttcaccattccttcctgaaactttctcttccctaatttcaggaaaaggtgtatattacaaaccatatttagcggaaattataacggcatcgcacacttaggaagtcgagcgatggttattgcccacactcgaacggagaacaaaatgaaaaaggtactgttggtgatggcaatggtttcgacacttatggtatctgtagccttcgcagagattcccccagatggtggtgactactggtttccaccaggaagagctgcactccattctgggagtagcgtaatatttgtagcacaaaacactgttcctggaaaagcagtcacatttagaccttcatttagttatgataaactgacatggaaaccaatgtcatcaagtaggatagcctgtgatatcagtggattcaccacatttgaatggaatgtacctgttgttaaagctaataaaaagatttggtttaaaatggcctctttcaatgcagctggcaaaagaatagatttggtcatatcccagtgggcaaatgaagtttggacaaacttagtaataacaaaagttagagacataggtgctaatcaagtgaatgataataatagatcatgtttcgcaaaagaaacaatagaactaatttgggatagtgacttagaacatttagattcagtatttatcaaacttccatttgttgaagtatctcaacattgggaagaacaaagtctgcaatttacgtgtccaaagcccagtgttcaagcttgcaaggctgctgtgacagcaacattagttggaaaagatgatgttgggaatgagattgcttctgatacgcaggttattacagtttatacggggtacaaaccacctataaatggttcgtggtcaggttccattgaatttaggtctggggaagaattcaatgtgaatggcagtgtaagtggaacaggctataatagaagaatttcagctacaatgttttccaccccaagtcaaacttgttcaggctctttatggatggaagaatatgcttgtactacaggagatatagatgtaacttgtaggcttccaagtggatattattatccttgtaacgggagcgattcagtagaggtgtggggtggatgcaccacggatttgggaggcacaaatatagtctgtaatgtgagaaattcatgttcttccaaagcaactattcgattttccagataaataagtggaataaatgctacatttcttaacagcagccacaaaattgtcctacgcttatttcatcggggctaagtctgccagcctatttggtgaagtcaagcattagtgtcccaacgttgctaaaaatgggcatccaaatgttgtaagtatttgatttcttttgaagtgaattttctgagacaattcaaatcaaaaaaaacttagacagcgagaaaactcaatcctgatgcggcttctctaaagttataacgtgcaacgttgggacatttctggaagtcaagtatactcactttcatctggtaacttttaaaagataattttcacaatgtcattttaggcattgacattatgcacactttttgtaccataaaaccaacaggtcttcacaatactttctctttcagagggggcgtggatggagtaagacctttaaaagtgtgctcatgtaatctcttgaaagttcctcttgaaggtcacttctttctgcagtctcaaattccctttctgacttatatgttttaaaggccttccaaacttcatgcgaagaatcagaggcggaaggagggtaaaatgaaaaaaccattatttctttcggcgctctgcgtcattttgattttttgtctaaactcggtctgttattcacaatacgtaataaaaaagatatccagaaacccttattatgacgatacaaatcctcagataaacaataatgggcaggttgtctgggagggatatgatgggacagactgggaaatattcctctatgatggatcaaccacgacccaactcacaaacaattcttacgatgacactcatccacagatcaacgacaatggctacgtggtctgggagggatatgatgggacagactctgagatattcctttatgacggcattgacaccgtccaaatcacggataattcttacgatgaccttgatcctcagatcaacaacaacggctatgtggtctggagggatcggcatctatactttggagggccggacagtgaaatatacctttacgacggctccaacaccatccaacttacggataatgcattttccgactttgatccccagataaacaataacggggtcgtggcttgggttggtaatgggctcttcctatatgacggcacaaccataacccaactgacaggggagtattcttacggaggcgaagatctccagataaatgacgacggttatctggtctggtttgcggatcatgcagcagacgaaggtggcgtatacatgtataacggggcagagattatccgggtgataaaaaaccgtggttatgagaaccgggacccggatatgaatgacatgggtcatgtcgtatggattcgagagcccatagagggtggacctggtaaagtcatgctgtttgacggcaccaggaaagttcaactcacaaacaaccttgatagtgaaaataaccccaaaataaacaacaaaggggaaatcgcttgcacgcgatgtagtaccagtgggtgtagcgtcatcgtttataatggggtaacctttaccgaactcacaatcagcccccgctatgttttgggtcctcaaataaatgaccacggctttgtcgttttccaaagcttttccgaatccaataatgatatctatcttgcatcacgtgtgtcggtaatctctcccgacggtggcgagcccgttccctccgggcaagcttacacaatccggtgggcggggccatcccaggcagtgaaatacaaagtcagatactccatggacaacggcttaacctggaacaaggctcatcagcaggcctttgtaacagagaagaccctggactggaatgtacctgtgctacccggtaacaagcgaaaatgcctcgtaaaggttgcagggttcgatgcctccggtacggcggtgagcagagaccaatcggatacaccctttacgatcgagatcttgaggctaacatcgccaaatgcaggagagccgcccattacatcaggtggacagcatacgatcacctggacaacaaacgatacggttgccgaggtgcatcatatcgttctttcgtacacactgaataatggacttacatggaagaaaattgatacgagtgcagactcagccgatgatggaagtttcatctggaatgtgccggatgtttccaaccagaaggataattgtaaagtgaagatcgtcttgaaagactcctccggcaataccgtcggaagcgacgtgagtgacggcgttttcacaattcagcctgcacctttacgctaactaccggcgaaggcggggctgagggaaaaacctcggtcctctcctctctcattgtgaattgagccctgaatatatcattcggtaatctgcagcagtttcaatttctaatacctgtggacttgtaggtgctatacgtcaaattggaccttaggccagcctggattcggaaaagagaggagtacttccttgaaagtttctattccctacttttttaaaatgctgtatattacaaatgcaaatgaacaacgcagatatccctgggcaccaatgaatagcttattctgaaattaactcgattctatataatatttttaatacaaccttttctagacaaatagcctgatattcgacctttttgactgaggaaaccctttagggcttaaagatttaataaaaatatagaagcagcttaaacaataagttatctgctcattgtagacagagaaaggagttttatatgttcaacatacttatttcctttgtctttgtatttgtttttatctctcctataaatgcattcgcccttgaaaaaggtgaacagataaaaatattccaggaacggattagagggctacagaggcaaggtatccttccaataattgatacggagtttcatcatggcggtgaggtggaggtcgagaacctcatcaaagagatggatgagaacggtgtggccctgatatggcttggatcgattcaaaaacttggcagtgaagaatctcagaggctaaatggattgcaccctgatagattcgtccctacgactattcacggtgatagtaaactatggcacagtggcaacaaacgttttcttgaaagactcgcaaaggatgtgaggacaggaaaatactttgtgatgggtgaattcgaagccagacattacccttccagcacaaatacaagagatgaacatacgactgtcgactccgaagccatgcaggttgtttttgagctgtcgagtgagacaggtatggtatttttattacaccatgaggcagaagatgttctgcttccggagttggagaggatgcttgttaaatacccaaaggcaaaggtgatatggtgtcatgtcgggcgcaacagaaatcctgaaacatggataaaattcagaaaagcagacgcggcgaaggaatttttatcgaagtatcaaaatctgtattttaattttcttgcatcgcaaccaggctctaaatatcaaccaggtaagggatatgccgccaaaaaacgcgctgaaggatatgtagagggaattatgtatgattactcctctggaggtgtatcgctttcatctgaatggaaaaaagtaatagaggagtttcccgacagatttgttttaggctccgacgctaatactggtggcggtttagaaaagtttgaaaaatatgacaaggtaacccacattttccgggatattattcttacgggtgttaaaaaggatgttgctgaaaaaatagcatttaaaaatgcatggaagttaatgatagggaaggcttgggaagattgagtaatgcttttgcccgcaacaagcgataacaaatcaatgaaggcgacgagtaatagcgccgtgccttttgaggaggtcaatgcccccgcgctttatttctatcgttatactcgattccaatcgtaaatcttcaggtgatgtagatagcgtatcctaattctttgtaggtgcactcgccaacctgaagccaacccgacaatatctgccacgtgagagatcccttttttaccagtaatgcgtcataatgcgaatataggaggaaataatggacattctggtcgcacgcacaaggggcagaatttccaaagctgccccgtaacttctcaattttctgatctgacttcgaccgcttcttcaattcttcacattcttcttgactttcccatctggtttgaatagactcacctcaccaaccttgagtcagcacctctgactaagcgtttacgagttggccaaacaaccaaacctctaaccttttggacaatgttagctcgtattattcgcaccaaagaaattaaattctattggtgaacgcattgtgacttccgcggttaccctatccattgacttcggttacaagaacattggccttgccctggtaagaaatcaggaaggggttaacactccattgttcgccgggactctccaatatgaccctttcgcactcagcaagaaggtgggacccagggcgcaactccgcaggggccgccgtaccaggaaaacgaagagataccggctgaactctctgaaaaaagcattgtcaaaccttaatctgtccgaagagggcatccaccagcttgtcaatttctgccgaagacggggatatagctccctgtttgaaccaagagcagtttccacggatcggggaacccaacctgaagaagaaattgtctttcgctttagccgggaggaattttttgccgcattagagaaagaaatagagcgacttctcccagaggaacagagaggatcggttcttgctatctgtgaaaaaatccttaaccgggctggtgaaccttcgcaagaaatccggcccctgagaatcgacaaccgaggagcctcccgttgcgcctgggacggctgtgataatgtccctcctcgcagggataacgccctccgggaccctctttcccaactcgtccatacggtatttgcctcaagtctcaggggcgacacagccctccagcaagaagtctcaagaatgttggaccgcatcgccgaattggggaaacggctccgccatcgtggaggtccagaccccgataaggagcgtaaggcccttaaggcagaaataggtgaagaactgaaactgttgaagaaactgtatggcttaaaccctgatttgaccgaagagaccgctactccctggacaaagattcggcagaacataacgaacctgatagaacagaccggagggcgcaacaggttctgccgctaccacagttctcaatatgtcgcccacttcatggagggaaaaccgatacctttcaaggcaactttgaccgaaagggatttagtgtctcgccgtgaagaaatcctgtttcaaaagatatggcgctatattgaggcgaggattctcccacttgccccggatggcattaaccatgtgatcgtggagcgaaccgccattgacctccttgcagggagtcgtaaacagcgtcaagacattatgaataaagaggcccttgaggagatgtatcagcgaggcccccggtacggattcacagatgatctggatatgctgagagaggagttcggcggtctatgcgcctattgcggccaggaacacgctgaactggttgaaagggatcatctccttcctcgttccaaattcttctttgacagttacttgaacatcgtgccagcctgtcccaattgcaaccggagccagaagcaagcggcctcaccagaacaatctgctctccatattcatgaaaatgcctatgatgcatattcaagatattatgattcgatcagggagaaccctcctcatgtgtttcatactattaagaaggggattctgaacctcatgcgtgatccaacccgtacctgggaggtagagcgcttcctcagcctcatcgccaaccagtttgcacaggtcacgggaacccaacgagggcctcgcccccttgcccgttatctcagcggaaagatttaccagaaatacggcgagaagccccgcatcggcttcgtcaacggaagacataccgcactgtggcggaaggcggcttacccggactttgacaaattcagggacaaggccgaaggtggggtcgtcaaccatgcccttgatgctttgcttatggcctgtgacctaccggacttgacctctttggaggcgagaaacctccagcccagtttgatgcaatggtgggtaaacaaggtgaagaaggcggccccgcctgaaggtcccgaaggaatacctgagttgcctgaaccgaattttgctgtgcctggatttgaaaaccttctgcctggaaattatgttgaagtcgatttagcgaaaatgaactggaatcataaggactccaaggtacaacgtcagggtgcttatggctggtcgatacaggaggacctccccgttcagcgtgtcacagccgcaagcctggcggatgagatccgccaagcagacaagaagaaaactcctgagtcccgcaaatctgaggtcaagaaagcggtgaatttggtcgtccatccacgactccgcaaagcgcttgaacaagcgaacaatggcaataccccgggagcaatcacaggcgaggcgctcaaaacctggttgaggaaatcaatcaaggggaatcttgataaggcccacttttcctctcacccggcagaccaacgcagagcaaagatgctccaagattttctcagcggacaatctgaaggcatccctgcggtcataggggtcaatacttttgtcccctcgttaaagtccaatacggatttgaatcgaattaaccctgcgaccggtcatgttatacaccgatatgttgccgaccccgcaaatgttgcttacatagtggcctaccagaagaagaacggtaaggtcaaacgggataagccgttgacccttgagtggcgccagagcggagccgtcatctctgacagtcgtctgtttaaagaagttcgtgaaaagccattgatgggacgtgcgctcggagagagagcgaccgaccagaccgcttggaaaactgctttgcgccactatttaaccagcgcaggaatagctgaatacaatttcgtttctcagggaaatgtggttgtttatgaagatgggagtgaacgatacgtcagaaacttttcgggcagttatgggttcagaaagtcttggtttaagggaatgacggcggttcggccatcgccgctgaccaagcgcttgattccaaacgcaacactttagaagatcttgattccgttctttgacaactggatagcgtattcaggttcaagctgaaaagagcatctgtccggaaggaccactccgggttagggcagatccggcacttgggcctccttggtcttcggactctggaggaaacctttccggcgtgtcgaaagacaagatgtgagcctgttactaaattctttcaccctgaactactcaactgcgttgagactgatgaagcgctcccacgtgcgttagcgactgagtttcagccaccctgaacttctcaactgcgttgagacccaggaaaggggtgtaaagcaatccttgactactgtttcagccaccctgaacttctcaactgcgttgagacgctatccttatttcttctagtcattagccggagataagacaccatttccgcgaacctgtggtttggcgtgatggattgctttcagatcataatctccgggttgtctaagtatctgtaaacgccacggtatctcatcagcgtgtacctcccgggattctgcgttttcttctgcttcgcgaaataatctgctggaattaagaaaaaagaaatccgatattcaattgtgtaacag

SEQ ID NO: 122 - DNA, 11101 bp, Artificial Sequence
  Synthetic
tccccgtgatgacaatggcagtgtagacgatattttttctactgccatgttcttctttgaagagcgagagaagcaggcctgcgatggcgaagaagttcagggggaacatgggttggatgagttccaaaccatgccggaattgtctgaaccagttgaggagaaatttcaaaggggaaagcataatcacgctaaagattgaaatatcatagggcaccctttgccagttgctcacccagttttgatccccgtatatcccgaaccagatatttttaccctgcgacatccagaacgggtttccggtagcgctcaagctcgtgtaaaggtgcggaaatgaagcaatgaaaaaaaagatgagatatactgtcgcttttttaagggatgagccttcttttcccttatgggtatagagtaaccagaagaacgttatgacaaccaggacgagcgactgataccggaccatgtaggcgagcccggcaaaaacgccagccatgataaaatcagaattcttttgctgttctttcatgatgtaatagacggagatgagctgaagggatagggcaagggtatcattcccttccagaaagaaccactggaggaacagggaagagaagagaaaaagctgggaaagaaaggcaagccgtctgtctttgaagagggccaggactatccggtaggtaaagagaagacaaatcacaccccctgtcagggagatgatccttgcagcgatgagataatcgttggagatgaagaagagtgtcttaagtaacaggggataaccaaggggaaatacaccgttgatccagttgggatagtcatgcaatgtgacgtagtagtctgcccaccatacataggtaaaaaaatcttcccagtggacaatgaggttactgaaactgatatatcctgcaatgatgagagatgcaacggggataatatagggcatcgtcgttatcatttcttcacccaaactgcttttttgtcaagatattttgtttgctctgatgttttgtttgctcctctaaaagggaaagtcccgcaatgaattctttctctccttgccctgagcatggaagtatcatattatttaagtagctatgagaactgattgaggagtcttatcatgggcattgcttccattaatcccgcaaccggagaagtcataaaaacatttacccatctgacagatagggaagttgagcataaacttgcactggcgcagaaggcttttgagcaatacaaaaacatacccatttgccaaagggcggagtggatgaaagaggctgctcagatccttgagagcaacagtaggcagttcgggaaactgatcaccctcgaaatgggtaagacatttgtttctgctgcaggtgaggtggaaaagtgtgctcttaactgccggttttatgctgaacgtgctgcagaattccttggagatgtccctgttgcaactgatgccgggaggagttttatccgttttcagcctctcggcgctgtccttgctgtcatgccctggaatttccccttctggcaggtgtttcgctttgccgcaccagctctcatggctggaaatgttattctcctcaagcatgcctcaaacgtgccgcagagtgctctcaccattgaagagattttccgggatgcaggattccctgaaggagtcttccagacactgctcataacggctgagaaagttaaagatgttcttgaagatgagcgtgtaaaggcagccacactcaccgggagcgagtcagccggtgcaagtctggcttcgattgcaggcagtaagattaagaagatggtactcgaactgggagggagcgacccattcattgtgctggaaagcgctgacatagccgaagcggtttcaactgctgttactgcccggatcatgaataatggtcagtcctgcgttgcagcaaaacgtttcattgtaatggaatcgattgctgatagatttggacaaaacctgaaggacaagtttgaagcactaaccgtaggtgatccgatgaatccggatactgacctcggaccgctggcaacgccggatattctgaaaacattagatcttcaggtccaggcgtgtgtacaaaagggggcaaaggtattgaccggtggtcaatccatgtctgattgtccagggaatttctacctgccgaccattttaactgatattccccctggtacacctgctgaccatgaggagttcttcgggcctgtggcgctcctctaccgggtcaaagatattgacgaggcgatcagctttgccaacaggacacccttcggtctgggcgcaagtgcctggacaaaagatgctgtagaaattgagcggctcgttcaggaactggaagccggtgctgtctttatcaacggcatggtcaggtcagacccgcgcctgccctttggcggcatcaagcactctggatatggaagagaactgggtatctacgggattcatgaatttgtgaatataaagacggtgtgggtgaaatagcaaaaaagcaatatacttgcaactggtttaggtttaatataaattaaaaaataatgacttaaattcaaataagcagatagggtatgttagcgaaacttaaaaaatattttagcgaaagaaaagatattgcatttgcttttttgtatggttctcaggcaaaaggaaacgctacaaaattatctgacgtggatattgctgtatacttttatccccggcaaaagcatcccgtggaatatgagtcaaaggttttttatgataatgaagataagatatggggagacctcgaacggattctaaaaaaggaggtggaactccttgtgctgaaccgggtttctgccagtgtagctgcaagtgcgattagggcgattcctcttgcgatcaatgattgggggatttatctcgattttatggaggttataacagatgaggctgaagattttatggaattagttatcaatgattataaagagaggataggatttgaaacgagaggctaaagtaaggcttattaaacatataacctttcttgaaaacgaacttctggattatgaacgattcaggtcattgtcatgggaagaatacgataaggaaagggataagagaagaaatgttgagagatggattgaaaatattgtgaattcgtcaatagatattgccaagataatcttagcctcagaagacagatcactccctgatacatacaaagaagttgtatctaacctttcacttgttactggtttcgagagtgaaactatggaaagtcttgctgaacgggttaaattgggaaacattatttcccatgaatatctggatataagatggaattctataaaaagatttactcaggaagcagagccgctgtataaaaacttcgtagtaatggttaaagagtatatcaaagaaaatatttaactgtcggggcggatatgcaggttcaaggtgcattgcccggagattataaagccgtctttgtattacaagcaaaggcggttattttgttttaggggggataatgagagctaaaacaccatgtgaaaacgaccccaattccctttctgtataagagatgattacccttggcattgattacggcgcctcatatatcggcgttgccctcgtggaaaacaccgggaccggcaacaggcctctcttcgccggcaccatcgccataaatgcccgcgatttgaaagatatggttgaaacacgggcaggcatcaggcgcctcaggcgaacgagaaagacaaaaatcagacgcctaatgaggctcagggaaagccttcttgcctgcggcataggcacggaccaggtcaccctcatcgtccgcttctgcaggaaaagaggttataaatctctttttgatgagggcgaaagcgaaacccgcgaaaaagagagcgacctcgcttaccggttttcccgtgaaaccttttttgaaagcctcgaaagggaactcggcctcatccttccggacaaccatctgaaacctcaagccctgtcagtctgtgagagggtcctcaaccggaagggagaccctttccaggaaatccgccttatcaggatagacaaccgtggagccagccggtgcgcctgggagggctgcagcagggttaccccgaggcgcgagaacgccctcactgatcccatcgcccagcaggtctataccacatgccaggaaaagataagagaaggtggagagcaggcaagggaaaaggttgacgatacggtcagtcagcttgccaccctcggcaagcgcatcaggaacgcctctggagaaggggcaaacaaagagaaaaaagtcctcaggaagaaagcgcgtatgctcctccgggagataaaggaactctattaccagccagccagggagaccctggatggtgagaaggcgtggaagtatattgagaccggcgtcctgaacatcatggagaagtcacaggggagaaaccgttactgtagagagcacagcgccgcctacgttaaaacagtcctcgcaaacgaggcaatccctttcaagcagaccatatcagagtcagacatcatctcgcggagagagcagattacctatcagaagctctggcgctatatagaggcacgggtgcttcccctcgccccctgcggcattgaccgcatcgtcgtcgagcgcaccgctatcgacctgcttgccggcagccgcaaaaagattctggatgcctcagaccaaaccaaagaggagatgtatcagcatggacccatgcacagattcgaaagcgtctcagaaatgctgcggaaagagttcaatgggctgtgtgcctactgcgggaagcaatcggattctctcatggagactgagcacatcctgccccgggcagagttcttcttcgatagctacctgaacatcgtgcctgcctgtccccggtgcaaccagagtaagggagcgcgcaccccctcggctgcttccctgaaaatcaacggcgaggcatacgaggcatatacgagctatctccagagcaattttcgcacgcgtcccctccaccttttccataccatcaagaagggcgtcctgaacctgatgcgcgaccctgaaaggcagtgggaggcggagcgttacctctccctcatcgccagccagttcgcccaggtcgttcagagccagcgcggaccacggcccttcgcacgctatctcttttcacgactgtcattacgtcaggtcagaaagcctgaaatcgtattcaaaagcggacggcacacagcgctctaccggaatatcgcctaccccgacttcagcaagtatgcagaaagggaagaagggggtgtagttaaccatgcagtagatgccatcctgcttgcgtccgacctgccagacccgaagcctctggaagcgctcggcttctctcccgctgatatgcgcaggttctgccgtgccgtcaggcagaaggccccggttgcaggtgatagcggcgtgcctgagcctcccgcccgcgacttctttgtagagggctttgaatctgttaaatccggctttgtagaagtgaggcttgatgccatgtgctggaacaagcgtgacagcatgacccacaagcaagacccctatggcctttctgagaaagtaaatcttcccaccaagcgggtgagcgcttttggcctctgcagcgaactggaaaagatgaaagatgaaaaaggagtgaaaaagaaagttgacctcattcatcaccctgccctgagaaggactttaggagacgccatcaacccggaaaaccccggcaaatcagcggcggaagcgctcagggcgtggctgagcgaatcggtgagaaagagcatccagacgtctgccttctccaacaaccccggagaccagcaacgcaaaaaggagcttgagcagttttcttcctctgatgagtcccttatcccggcggtaatcggcgtcaagatgttcgatatgggggtgagggggaagattgacctccagaggatagacccgcagaccggcaaaaccgggcaccgctacatgacccagcctgcaaaccgggcagtcatcctggcgtatccgaaaaagaaaacaggcatgacggatatgtccaagccctgcattgcccgggtgaggcagaactattcccttcttcctgagggaaaaggaatcttcaaggaacttccggagagattgaaggagggcataatactcggaaaagagaataccatcctggacggctggaacagtgaggttgagcattacctctcagtctgcggtttcagcagttatggcatgctcacggcgggatgcgttgtctgctacggagacggcaagaagtggtttctaaaaaatttcgatgaaagcaaggaattcagaaaggcgagactaaggaacgtcgttggtatcctgaggtcgcccttctccggaagaatgacgccattaaagcctttgacttaggattcataaggtggtaaccctttaccacattgttctttgacaatcaggaccggttatcagttccggttgaaaagagcatccgcctgagggcgcactccgggatggggcagtcccggccattgctgttcccctggcatggcaacatgctccgggagcaaaccttcaggcatgtcgaaagacaggatgtgagcctttttatcatcgagcacttgtttcaatcaagatgattctcaaacagtcattgcgacttggggtaaagggcaagttagggacgtgacgatgtttcaatcaagctgattctcaaacagtcattgcgaccttgaagatttatggaagatgatggaagagaggaagggtttcaatcaagatgattctcaaacagtcattgcgaccctgtaatctgtgcggatcaccccctatataagtttcaatcaagctgattctcaaacagtcattgcgacatatggagtttataattggcagaaaactgacaaggtttcaatcaagctgattctcaaacagtcattgcgacagccaaaaagctcttgatgttcaatatcgtatgggtttcaatcaagctgattctcaaacagtcattgcgactgcggttctgatttgtcaaagaaaagcgatgtgttagcagggtatttccgcgaaccccatccttcacgtccataatgtgaggaaaaagcagcaaagatacacctcatagaatattttcaaccctttgaataatggcagcatattgattttccgcgaaccccaaagacaaaagattcaggacgttctaaaataatcctctaagaaatagctaaaacaacgagtaaaagtttgataaaatgaaatcaatggaacaggccctttttatatccaaggttgatagcctgaaatattatgaagatacagacgaatttgcccgcctctatttcgggatggagttctgtgagagacttcttcccaacgtagatgatttgaagaatgtgatcaactttgtcaatgagaagaagataggcctcacgctggtcactccctatgttactgaggatggtctaaagagggtcgaaaggcttctcaatgtattgaatgagcaaaaacccggcagcgaggtggttttcaatgactggggtgtgtttcatttgttgagcgacaactatgcagggctggttcctgtgctcggaagactgttaaacaagatgaagcgcgggcctcggttaatgaatgtgctggacaagatcccggaggaaagcgtgagatattacaggagcccgggcattactgttccgaaggtaagagaatttctgcttaaaaatcggataaaccgggtggagtttgacaacctcctccaggggattgacttggagaggacaggggatgagatcaggaaatccctctacctgccttttgcttacatcaccactacccgcctctgcctgactgccttatgtgaccagccggacagggtgaaagaagtggggattctcccctgcggtcacgagtgccagcgatacactttctgcctgaagaaccccatcatgatcgctaacctcatccgcaaagggaatacaatttttctttgcaacgaagacatccctgataacttgagaatgtttgaccgggtagtgattgagcctgaaataccaatctgataaaggaaaccatgaaaatcctatcccccttggatagcaaggaagaagtagaagaattaatacaggccggagtcgatgagtttttctgcggcctcctcgaggagaagtggcatgagaagtacccggtcatctccatcaacaggagacctgcgggaaaggggcatttccggagctttgccgacctaaaagaagcggtcatgatggcacaagatcaccatgtacctgtttatttcacgatgaatgaacactactatattgatgagcagtatgacctggttattgattatgtaaaaaaggctgtagacgcaggtgttgcaggaattatcctcgccgattacggcctcctcaccattttgagcgatttgaacctgccggttaagctccagatcggtaccggaggaacggtcttcaattcccaggcggcaaagttttaccagaagacaggagcttcaggcataacccttccgcgccatctgaccattgaagaaatcaggaagattgtgcagaacagtccgggaatagagttcagcgtctttatcctcaactcccggtgcgtgaatgttgacggcttctgcacctttgaacacggcctctctgataaatcatttctccccctctaccggaatgcctgtatgcttccctatcatatttccctctatccacaggtcagcgctgaggagcgggatatgggcgagataatccgggaacaccgctttttggaacggcagcacatatgggagactgttcacgtagatgaccacccctgtggtgcttgtgccttgtacgagttcaaagagatcggtatccacgggatgaaggtggtgggacgcgggaatccccttgaacggaaggtcaaagatgtaatttttctgcggacacttctggaccggcttgagaaggagcgtccttccttgcctgagttcaggaattcggtaagggagctctatcagagcacctattcacgttcctgccgtactcacctctgttactatcctgaagtaagggaaactccggcataatattttcttgctgcctgtcacaattcatggtaaatttatttcgattatctaaccattataggataattatttagacgtctaaatatatctccagccatagggtcttatgaaagaggaaagggtaaaccatcaaaatcaactgcgcggaaggaggatggggatatacacagggagcggagcctctcattcctggatctggtttgttgatatccttgaaaaggcgggtgtcgacaacctcaccttcctgggagaagacgacatcaaaaaggatggtaacctgcaaacgttagatgtcctcctcctctcgggaggagataccttctcaatagctgaagggttaggcgtggagggctcagagaagatagaacggtttgttgcagaaggtggtatttattttggctcatgcgccggtgcctacctccccatgaggtcttcaaagtatcctttgaacctaatgaatcttgtcggggtaaaaatcagcaacctttcaagatcacttccccgtccgctcatacaatcagaaaagttttgtactccctatggatgcgactatgtctttcatcctgtccgtgatgaagtgaagatcaggtgcaccaacgtatacttccctgaagagcaatttgtagcaccgctctacggcggtccctgcatggaaccatcagaggatgcaacgccggtagcatattacagcgggtttaccgacaagacccttttccttgttgatgaagacctggccagggagacagtgcagggcaggatagcggtttgcagcaagacgataggcaggggaaaactctatctctcaggcccgcaccttgagcacccgcattatccgacagcgaaccggttcctcatggagatactctctgatggtctgagagaaagaaaggcctttttccataagcgtggtgagagtgaagagaggtcagagataccccgcgactccttcagaaaactgaaaggagagctgagcggcgcacggattatagccctcgctctggagagggagaccatgacctggctcatcgggaaaaaggtatatgagccggagaaatttcgtgtatttatcgatgcactctggagccgtatcaataacctggagaaaatctcttggaatggcctgagcagcgagacggttcacggcctcgcggcctctgcaagggaagtacgggaaaagctcaaagagctgaaaagtgaaatgcaggcctcaaccgataccacggggctcgtcgaagcaataataagggagttaaggactctcgcatctgcctttatgaatgtttacttcggtgtgaaacgaggagaaaacgtgcaggaggaaaaaagcaatgtacatgtattatgaagctcagtgggtcctttaccttttcacggtgattacgatagttatcttcttcatcggtgtctatgccaatatctacctcatgagaaagggcaaagcgaaaagcctcatgtacacattcagtatcggcactatgatgcaggcccttgtgtttaaggtgatactccagagcaagctttttcaacagagcatcctccgctggttcatgcacatattaatattctggggattcatgggacttcttgcgcatacggcttttcttgcctacttctcttatttcgtatcaccgaattcagccgtggcgcagttcttttttacgcccggctcagggggcagactcttcttggatttctggggagatttctggggggcactccttctggcagggtgcctgatagccatcttcaggcgctacataactaaaaccaagcagctggacaccatccttgcagattcggtcgcgatctggctcctcttcttcatcgctgcgacgggtttcttttgcgaagcagtgaggttagttcatctacccccttcagccgagtatgcatactcatttctgggctatcccctgagcaagattcttttactgtctgtgccgtcggattctctcaaggcgcttaaatatacggatcaggtgctcattcacctgtccataggactatttctcattatttacatacccttcagcaagatgtggcacatctttgt

SEQ ID NO: 123 - DNA, 20179 bp, Artificial Sequence
  Synthetic
atattctccgtccattttttacacttctgcaatcaataaattgaaacattggcagcctaaattccgctattaataaatattgaactgtttttaaggacagaaatgccaatagaaaaagcgctaatatcgcaggcggcatctaaaatagcgatttccaaactgagggaaaaaatcgaaacggaagtcgtaaagggatgtacacccgacatatcccctcatcgaatagatttggaacctcaattctatccgctttggcaattgagagatgatatcaataataggaacctttggtgcaacaatgaagtatcttccataaaaccagatcattttatcaggctacaaatctggatctcgcccgatcaaaagcttgactggattcaatctgatcttttcttaaaacagcttaaaacaatcaagcatagagcgatttttgaggttcacggaaatagagataaaatagttatctctatgcaaacacataagaatgatattcctattgtaatagcggcttttgagagccaattcgatcaatgtgagctgacaccatttcaaactgggcccgggtgttctattttcaacagagcaaatatgatttctggatttagagactttttccctccacctccatattcgcatttattaactcgcccccaagaattaaaaactcccctttatcagctttaatctcagttatttctgccattgcccccccagcaaatggtttactgcaaacgattttccaaccggttcaaccaatgaataattggcaccgtaatgttgaaatacttttagatttggaatatattatgaagcttaatagcggatacaacccacctcagagatacgcgcagcaatccccctccggagacttacggcaaatggcatgggaggtagaaagtaaagcccataatgataaacctttttttgccatggcctttcgaattgtcgcgctcaacgcaggcgatacaaaaataccaatattagacgctatgtctacatatgcaaatttgtttcagcatggtggacgaccattgcgatatttaacagagaaggaatatttgaatgttctgtcaaaagatcaaatccacaacatgcttaaatttggtttcacttatcgtgctggttttctcgctaattccctagagctttccggctttgtgcacctcccatttattgatgttcaagaaaataaccctacaccattaagtctattggaaacgctctccatccgtagccctaaacttctatccggtacctggattggtaatatcgactatgccggaaagatacaaaagctttgcctgccagatgatgaacggcaaaggcataatcacttaatcggaaaaccgggtacaggaaaaagtacaacaatagaacatatgattttgagtgacattaaacagggccatggtgttgcggtcctggatccccatggcgacctaattgagcgtatgctttatctcattccagagcggtttatccataaaacaatctatttcaatccaggtgacccggactggattcctatatggaatccccttgaacgcattccaggtcaggatattggaagaacagccgacgatctcgtccaggccattcagagttttgtagcgagaaatggatggggagatcggttagaacatcttttgcgaaatatcattttttcaatgattcatctggggaatggtacgtttctcgatatttcaaacttgatgagaaataagtcagatgaaagtgaaatgcttcggaataaaattcttgaagtgattgataatgagacggtccgacaattttggatgcatgactataaaaaatacggcaaagatgatttcggcccgcccaagaacaagctcagcaaattgttagtttcagaaagcgtatctctgatgctctcttatcctgaaagccggtttaattttcgaacaattatggatgacagcatgatcttgcttgtcaacctttctaacttgggatccatggtgcgtgagatactcggttgtttcatactttcactattacacctcacggcattgagtcggagtagcatgcctgcgaatgaaaggaagcaatttcatatacactgtgatgaagcccaccggtttgtaacagattccttggaagatctcatcgcggaaacccgaaaatacaatgtgagtttgagtttggcccaccagtatatcagccaattcggtcaaaaaaaaaccgatgccatttcgagtgttgggtcaacaattatcttcaacctggacagcaaagatgctggctacatgatcaaagatcttcaaaaaaaagtaaaagtagaggatattgttgccctcagaaagtacgaggcaattggtcgtataggaactgaaatcgtgaggtttaaaacacgtccaccagcacctaaccctatcaatcatttcaaacagcaaattatcacagaatcacgaaacagatattatttacccaaacataaagtcaaagaatatgttcagagtcgtagcaaaagatggcatgaaccatacaggctattaacaacaccaaggtatgatagcactggaaacattgaggaatttgaatatgacgaatttgaatgatagaatcgatgcaacctccatccttgatgacgtttttcagcatatggaagaatcacatcttcaacaaacaatagatataccgattaaaatgacggctgccggatttgattcatacgaaaatgaggaaattacctttcaatcttatgtgtgcattattggtgcctttataaagaaactttatcagctaaaaattttttgtaatcaaaatttatctgatgaacaggcacaatcggaagcggtggtcatactggatcggttttatccaaatatgaataatgatggattgatgagcgcatacttagatacccttaatgccgaattggatgggaataaattcattattgcgcagttggcaaacatcctaactcaaatagcgagagaaaaatatgtaaaatggattttctcaagcaagatccattcacttgattggtctacaaaatgtgacatcaccgaagccgtccttgcacaaaatgatcgtcacctgacggcagatattaaaaattgtcctcctgggatacttgttgccgaactttccgatctaattcaagcagctttagcctcagaatttaatgtcaaagaattccccgccagccaattattcacatctgacgtgcaaaaaaatgatgcgattgaaacgtcaaatcacattctgctgctttccttgttgaatgacttcatagaataattcagctcgaaaatataaaatgcgctatcagaatcgtgaaaaaataagaattttccgacgcctgttccatggcttgacgcatgtttatgggtcccatgacattcaaacgggtcgatcttaccagataaaaaagccagtcaccgacaaggtaattttaaatcatctgctgggaaaaaggccatacggtgtctaccttctcgtgaaggataaaatcagggcaattgcatctgattttgacttacagaatcgtttggcgccaatggagtttgtttcttccgccaaacactatggcctggatgcatatattgaaaggagcaagtcaaaaggatatcatgtgtggattttctttgaaaatggaggcgttcttgcacgtaaagcacgactcgtcgttcgtcacatcttggaagaaattgaacatatagaaactgagatctttccaaaacaagaccaaatagatgaaagtgaatgtttcggaaattttattaacgcacccttatttggatctttggttccaaaaggaaggactgtttttataaatccgacaacatttaagccatatacagatcaatgggattttttaaaatcagtcagccggtataatgaacaagttttggatgatatcactgagctaaacaatttagatcaacaagaatacgacaatctgccaattaataaaaatgtgggacataccctattatattttgggttacctatatgcgcccaaaaaatcatccaaaatggggttacacgattccaacgagatagtgctttcaggcttgccgttcatttgaaaagaattgggtttcctatcgatgtcaatattgctgtactattagcttggtcaaaaaaaaatcaacccgaaaataataaacgcgtcataaccgagaaagagatcatcaagcagacagaatatgtctatcataaaagctatcgaggatacggttgccaatcagaggcagttagacatttttgtgacatcaagtgcccattaaacaaaatgtaaaggaaatgcattcagcaacatgtttccaaatgaatccagtgttgacagaaaccttgcttcctgtttacttactccagaggaggccgcccagttttttcggaaaagtttaagttgggtatataaaaactggaaggaattgggtggtaggaagctcgggggttctctgttcttcccgcgaaaggaggacctatatgagcgcatttttagtaaaaggaaaggggtggagatacgacttcactctgaagggaaccaggtatacgggaacctggttcaaaaccaaacgagaggcgaaacaagccgaatccataagaagggaggagataacaaacccaattccagtgaaaaagacgatcccaaccgacatgggcttcttgacgttagccaacaaacgtcttgattacgttagccgatatgacacctatgaacattaccgtcatactttgtatcatgtcaaacgatgggtaaacaaatggggccatatgaaatgtagcgaagtttctggagatttggtcgaagcttttattcttacacgttctgaggtctcagcctacacggcaaataaggatctacgatatcttcggtcgcttttcaactttggaataaagcgaaaatggatcatagaaaatcctgcttccgatgttgattttcttccagaagaaaaaaaacggaaatatttaccgcccaaagaagatgttctaaaggtcatttccgttgccgatcctgatactcaagattatctctggaccttagttttgacagccgccagaatgggtgaagtcaactcgcttacatggggtgatgttaatttaaaagatcgatatatcactctttggacgcgaaaaagaaaaggcggcaatcgagaacccagagacgttccaatggttgccaagctatatcagatcctctcttatcgttacgttaatcgtgatcgtaataaaccttgggtcttctggcatacctattggagccgcaaacgaaagaaatttataactggaccatatgccgatcgtaagaaaatcatgaattccttatgtaaaaaagccgatgttaaatatttcagattccatccattccggcattttactgcatcaattcttgatgatttgggcgtaccgattggtgttattcagcgaatcttaggacatcaaaaccgtaaaacaacggaaggctatctgcattcaatcggggaagctgaacgacgtgcgatggataggttggaaaaagtagatatcttttcaacagatttaaacaggaagaatgattggcaaacaaatgtccataaggaattttggcagcgaaaagtgaaaaggcccaaatatgttattcttaaaaaggacatcaaaaaattgggatatgttggtactgggaaaaaatacggtgtcagtgacaatgctgtacggaaatggctaaaatattttgaaaaaggtttaaattacgatgttgaatgtatttcagtataaagaagaaatagtttttctcacacgattctcacacagccgaagcgtcacagaaaaaaggggcacccaatattttggataaccccttattttctttcaggaaaaatggtgccgagggacagaatcgaactgccgacacggggattttcagtccctttttatagtgttttcaataccttcccatatcatcacaaatcgtaacaaagtccttgacatcattcattattcatgttacctttacagtcatgaataatcacacgccaacacagaacataaaccgaaaacatggacagaacatggacaggaggcccctctccaaatcttggaggtgggggcctttctgctggggaacgggtacccaccataaaattttttgtcagactttgctaataattccgataatatgggaggtgtagcatgccagggaaggttgttaaatatccaggagtccgcagaaggaccagaaaaaatagaggcgttgacgatgtctatttttcaatcttttatccagtggacaagctggacaaagacggaaaccctgtccttgatcaagacggcaacgttgtccgcaagcccaaggaggaaggtctgggctgggcctccagtggatggacagggaaaaaggctttcaaggagcgtgaaaaactcatggatgccgccaagcgcgccaccggggaacctgtcacccttgaagcaaaacggaacctaaaacgtaagaaggacacagaggcccgagaaaaggcagaggcagagcaaaagaaattaattacctttgccgacttttgggaaaagcattactggcctgataggcagaagtcaggccgaagtccggaaaccatccgcaaggaaaaagagcatttcaataactggttgaatccagccataggccaccttcccctcaaaaacattgttaagctgaatgttcagaaggtccagcacaacctcacaaaagctggacgtagtccccgaactgtccagtttgttttcaacaccttccgtcaatgttgggagtatgccagggacatgggcattgttaccacgaaatcacccaccaaggacaaggctttcaagtatgtctccaggttcgacaatcagagaatccgttttctctcctacaccgaggccgaggaactactgacacgcctcaagtccaggtccatcattacatatcagcttgcccttttatccctggacactggcatgcgtgccggggaaatgttcaaactgcaatggcagaacgttgaccttgaccggggaaccattgctatccatagcagtacaaccaaatctaaaaagacacgccatgtcagaatgaccgcccgagtcaaggcaatgctgacagaaatcggcaaggggaaatatggtcagcttgtctttatggatgaagatggaaaccagttggaaaagatcagcaacaccttcccaaagaccgttgacgatatgaaactgaacgaaggcattgacaaaaaggacagggccaaccggattgtttttcattcactcaggcacacacacgcaagctggcatgccatgaacggaacctccatgcgaaccttgcaagaactattaggacactccagccttgtaatgacgcagaggtatagccacctgtcacccgaacacctggaggttgcctccgtgaattttgaaaatgcacttaaccaaaaagtagtagaactcaggagcaaggaaaatgccaacagctaattgggaaaaatggttggacattgactacaaagacttgtcaattgaccagtgggcatgggagtttgtcagacgcaaccctgactatatccaggaatataaaaagttcaagccccaggaaaccattgccaatgttggggatgcccgacactggggcttgaagcgtggttatatccctcccaccactgacagccacccacggattgaattctatcggtcctatggtgatttactaccagacggacaccctgtccctcctggaaaagtcgcaattagctttgatttgtccatgccaaacaagccccagattgaatatgccaccaagctgttgaaggaatgcagaaaggccccgaaattcgtcaatagatgtgtaaatggcgagcttcttgacgaaataagtgtgccacagaccaatattcaacgtgataatttgccgtattatctcgccacgtgggatgccagaaaaagtaacttttccaatgccaagatcgccaaggctgtatatccgcacgccttcaaaacggacccaccaaatgccaaacaacgtattcaaacgttttacgataccgcaaagaagtttatcctcgataagcaatatgctaacctcttgatccgcccatagatcacaccattgacaatggttccgctggtagtcagaattttacttataaatcaatatataattatttgattgttaacacaggagtttctacgagtggtaggattaatgggtcaaatccgattctagaggttagagcataaacttgttctctgagatatggatgtaaaatatatggtgcattgttttttgcccaatgttcaatatgctttattggaaatttttcttcatctacacaaaattcaccaactaattcaaccctcatcgaaaatggagaattactatccttctctaagcctatctcaatttttatagcaatatttattctcttactttctacatcatattcgctatatccacttagtagattgatctcagtagcttctggcttctcatcttcattaggtatttgattagagcgaatgaataattcaagaattgtaatcttttcaagttgtatgccgtataattttgtaaaactgttgtttttatctaggttattcataatatcatgcagccgttttatatgaaaaagaacgaggagtagtatttactttgctaaattgaatttgccgtttagtacttcttttcactccttcaactttgcactcctttgattgccagatagacaagtgatcatcgtgtgttgaagtgtattcaacaaatgctctcttaatactctttaaatagtcttgatcaaattctaatataagttgtttacttaattcatagtcgatccattcttttgcaatatctactataaattttttgcttaaagccccagactctaatagagcggttgcaatatcgccttttttatgtttttccagttcgccccttaattcctcttcagtcattgacataatttcttcaaagaccttttgtgaggcatctctaattttatccattgttaaacctctatttgcaactttttaatgcaatcggtatctcgaactaaatagcaataaggatcccctaatatgagtattggataatattcacaatacttcatttgtggcggtgaaaccctcatttctataatttgatatttttgattattttgggcttccaacctattaataaaaagatcatatgtcgctgcaagatattccaaccggtttggtatctttttatttgctatgattattgcaatttgattttttaactcatgagtttcgatgttaagatactcatcatcattaacttcaaagaatccaatgatcaatgcaaagtttgtgttgttatcacctatataacgacctcgatcattgctgtatctccaccatgattctgctaaatcttttgcatgatagctatcacaccaaaaatagactcctgttcctctacgcccaattctacctttaaacccttccctgcttatcttctcagtcctagcaattgtggttccgtgagttccagaaagttttttcatgaatacatagaaagttatcggcgtgattttttattttttacttaaataattataactgttttcgttagcacctcaggattttattgtcaaacttaatttttgttgccattaaaagatattgtactaagaaactattgttttatatgatatttttcattgcgaattaatttttcctctaaaattcgcaattatcatatcgaataaagtatcgagggcttgaatatatcaaaagcggtgacaacatagatggatactctgccattacaatgtgtttcccatgttcctcaccaactttataagcttgtcctcaattatatcttgtggttccaaagttacaaaaatttgacaatacactaaaaaaggtctaagaaatactaatctctagatttccccgacgattaatctaaaaatagcgttccataatgtatttattttaggaaatagattgtggacaaacaatattcaataggaattgatttcggctcaaaccatattggtttggcacttgtttgccattcagatggatcaaaccaacccaaatttgcaggtacccttcactacagcccagcacaactgaaaaagaaattaagcccccgaccgcaattaagacgaatacgccgatcaagaaaatcaaagcattccaggctaaaaaggttatccaatgctttacgtgccctcaatcttgatgaatcacagatcaataagatggttatcttctgtcgtcggcgagggtggaaatcattgtttggtgaatctaaaattgaagacaaccaagacagcgacgaacttgtattcaggtatttccgtgaagatttttttcttgctttagaaaatgaaattcaatccttcatcccgccagataaacagtccaaggtaatatccatatgtgagaggattttaaatcgccctggaaaccctcataatgaagttagaaaactaagaatagataaccgcggtgtttcacggtgtgcctggaaagattgccagcaaattactcccagacgccataatgcgattaaggatgcattggcccagtttgtttatttgattattgatattgagcaggttagaacggatgatagcttaaaagataaaatcgatgccgcactagatcatcttgaagagttgggcaaacgactttgcagtgccaaggttgctaatcacccacctgaaagacatgatgccatcaaagcagagcgaaaggtgttgctgaaaaagattcgacaagaatcagctttgataaaagagttggccaatcctgatacatggtcaaccaattacgcaaacattaaaaatatccttgaaaatagcggtggcagaaatcgatattgccggcatcacagcaatgaatttgtgaattttcagcttgctggaaaagccataccattcaaaaacacattattggatagagatttaatatcacgccgggaacaggtccttttccaaagaatatggcggtatattgaagcccgccttttgcccctggcggatgcaccgatcacaagacttgtggttgaaagggttgccattgatttgcttgctggaagttggaagcagatccagaaaacgggtgccgctacacttgaagatatgtatcagaatggccccaggaaaggttttagtagtaccctggtaatgttgaaggaagaatttggcgggctttgtgcgtattgcggtatagaacataccagcatattggaacgtgagcacatattgccgaaagcggattttgtttttgacagctatctgaatcttgtgccatcgtgtccggagtgcaacagacaattgaaaggtggccgagcactaaccgccgcacgcttgaccatacacgcggatgcatacgatgcttatcagaaatacctagccagtaagttcaggaacaaacccttacaccaccttcatgccatcaaaaaaggtatcctgaaactgatgacagaagaaaaacgaacctgggaggcagaacaatatctcgcactggttgccaagaatttttcagaaacaacaggatcccaaagaagcccacggccgctggcacgctatctatctgaaaaactaaaatcaaagtttggtgtatttccaaagatagattttattgcaggaaggcatacatctctctggcgacaagtcgcatttcctgaatttgacaaagcggaagataaaacaggcgacaattccataaatcatggcctggatgctataattctggcttgtaaattaccaaaaccaaatcttctggagggtgccaatctgccggtaaggcatatcaaatcatgggttgaaagtgttaagaaagccgcccctgaacctggagacaagggtattccgaccataccttcagttgagtttgttgtgccaggatttgaagatgtttatcaaggaaattacatcagcgttgatatggccaagtttaactggaaccgtcgtgattcaagtgttcagagacagggtatcttcggttggaatgagcatgtcaacatgccaactatgcgaaaggctgcgtcggcacttgccgcagaattgatcgaagcggataagtcagagacaaagattaataagattattaataacattctgcatccgcagttgaaggtggccttaacagaatgttgggaaaaagaacaaaccggtatcgcctgtgcaaatgctttaacggaatggacacgtaaatctattggtggatcgataaaaacggcgtccttttcaaatcatccagcagatcaaagcagaaaacagctattgcaggattttgcagacaaaaaaactgatagtattcctgtaacaattgggattaaaacgtttcgtccttccgatacaaaggcagttaatctattccgagttaatagtgggaatcatataatccataggtatcggtcagatcctggagttgttgcaaagattgcagcctatccgaaaaattgtgcccatgttgaccgaagaaagctgattgattttgattggcgacacaattgggctgtcatacccaaaaagagccgaataccacagccagatgatgacattttgctaggacgggcatatggacaacctatcccagacgaaagactatggttaaaagccctcgagacatattttacaaatatcggcattgttgaatatgcatttgtgcgtcagggatgtgttgcagtatatgaggatgaaacccaacagttcataaggaatttttcatcaacacagggatttaaaacaaagtttcttaaaggaattatcggcataaaaagaacgccgtttattgacaaaataacgatgaaccgtgtaatagacagaagaataacccccgctctttgacaaattggtagcagtaaaatttatggtttaaagttgaaaagagcatcctgcaagaaaggtgcactccgggtttcgggcagatccggctcttgccaccttcttgggtttacctctgaaggaagccttcttgcgtgccttttggcaggatgtgagcccttatttcgtgccaacgcctacgcacgaagtgcgactatcaaggcccatgcaaacatcattgttacaaactatttcaaccaacgcctacgcacgaagtgcgacccatgagggtgtttgcatacaacgcacccatgaatttcaaccaacgcctacgcacgaagtgcgacttaaagagcagttgttatgccatgctcggggcgtatttcaaccaacgcctacgcacgaagtgcgactgcacggtgttagtgtgtatgggcccccgaagttatttcaaccaacgcctacgcacgaagtgcgacgcggcgaaccagtccctcatcttttggtcaagagcatttcaaccaacgcctacgcacgaagtgcgaccttataaatatcaatgtcaagtaaaaaatgcaaaaatttcaaccaacgcctacgcacgaagtgcgacaatcaaaagcggtatctgatgggtataaacgaattatttcaaccaacgcctacgcacgaagtgcgacttcattcaacaggtgcttgcgcaactcgaccatcacatttcaaccaacgcctacgcacgaagtgcgactgcgcctgtcctgctggaacgacatcacattaaatttcaaccaacgcctacgcacgaagtgcgactgctaccaatttaacatatcgttataatatcgaaattaggcctgtttgtgcgaaccttcttggtttgaatgagcaggcctaactgcgtttaatctcaattaaataaatacaaaattaaacaataggttatatttattgcgaacctccttgggattttatgtatgattagggttcgcgcttttactgaaattgccacttttcagttaaatatcttattgatttctaaatcttcgattctccattcaaaaaatatcctaaccttccattcctgctattgcccctccaattacgtcatctcttgatcgttgatgataaggaaagtcagacccccgcactatcgttatatcccgccttacctccgtgtgatttcataggaaacatgaacgatcacacggaggaaatcatgtttgattttggaaaattcgcagaaagttggcaggccccggttgtcgcacgcagtcagattgacaagttcagtggaggccttctccatcccttgacattgcggaacctggattcattgggccagggaccgccacggatcaagctgggccgcaaggtggcctatcccgtggacacccttgtcaaatggatggaaacccgggccaacggaaaggatgggaaggatgggaaaaatgacaaagctaagagtgtgtgaaaaggattgcgttttttgtctatcggaatgtccagcttgcgggtcaatgaatgtcgatgtgcggttttcataccattgggaatattcaaaccagaccatgaatgaactcgacataaacgctacccatttctctgcaaccatgcgttgtaatgattgtggaaaagaaatggaggtcgatgatttggcttctaaactagatcgccacttcaatctgccttttcaagtaaaaattaccattaacgataaaggaagaactcacactgaaaaatatgaggtttaatcatgccgtgtctatgctgtaactgcgaggaaaaaggctatcaaccggacacccgggaagtggactacgtttgtagcacctgcgtcaccatcctgtccaaggccagccctgccctggtcaaccaggcttatgaaaaggcagtggccaaggggttggacaggaaggccaccgcattatcaatgtttattcaaccaatggaggaaaaacaaaatgaccgaacaaaacaccgtaatcttcaaaggcctggtgacggaaaccgaggtcgtgagttttttaggtctgacaaaaggacaactgcaagaactcaggctcaaacacggattgccctttgtgaaaatcaacaggaactgccgcctgtatttcgaaaatgacattattgagttctgcaaggggcagagaacggttttaaaccaggctgaaaacgattcttaacgattaccatggacgtagggacacgtccatggacgtagggacacgacaaattttaagggaatggtattgcaagggtcaaccaaaaaaggaggaaaatcatgaagacactacgtagctgtattatcaatgattggcacaacccaaaactatacgataaggccgaggcgctcgagtatctgaatgtctctgataccgagtttgaaacccagtggcaagagaacggatgggaacatatccaacagcatgacggcgttctgttttgggaagacgacctgcgtttaatgcatggacgtatgtggggaaaagtataaggagggacaaaaaatggctaatgaatttaaactgccggcaggcgactgttccaaggaattcgcaaggttcgctgataaaaatgaaatgacactggacgaggccgcgaagtgggccgaagaccacgacgtcaaattattccggatttatcatggctccgagtttgtatgggcgagcgtgaacaaggatccgttgaaggaggcgctggcgctgaggcccaggcgctgaaagaggtcatcccccgggatctgtttggccgcagatgaaacggctgggaccctgcccagccacccgggttcaccacagggaggtgtgcattatggcagaagaaaaaaagagtaaaacatattttaaatgggcgaaaaagtattacgaaaaacgtggcaggccggggcatgagatcaaggaaaccccacgggagaggcagcagaaccgtaaaaagtggctcaagacgctcagcaaggaggagcgtgaggcagagctaaaaaaggaagaaagatggcaaagaagttggaatgcggaattttacggcatgactccgcgtgagttctcaaaggtaagcaggtactggatcaagtcgcacaactggagcatatcgaaggacggttatttttatgatcatatttcaaaacttggctacttccggccgtacagcagcgcccacgagttcgccattatcccaatggaggtcttcgccatggtcggcgcacaagcggcagcagtctacggcattttgcggtataaatgttacaagggccacgttgctttgatcaccagggaggaaatcgcagaaaagatgtgcagcaacgttaagaccgttgggaggatgattcaaaaattgaaagatgtgcagcttgtcaaggaagtgcgatgcaggaatcggagagcgtatctgttccttttacaccccgatttgaaaatgaaaccgggcatgtttctaatcccggtagtcgaggaaagccaacaataacaggagtctacatacaaaatggtcaaaatatctaataattgtcgggtagttacggctgaaaatgccaaaaacaacaagacattttgtcctgtactacaagacattttgtcctgttccaacaagacattttgtcctgtactacaagacattttgtcctgttcttatataataaaggagataggagtaaaaacaaagaagagtatttcaagagaaatactatacgttttcgcgctgcgcttcgcttgcccaaaaaacgtctttgatcgcttcgctttttttggacaacattacaccccttgcccaaggaccccaggtccatccctgcaccagaaatataatcacaccttgccccactatggaggtgtcgtcaaaaatgacgacaataactccgacaagtctaaaaacaaaaacaaaccggttaataagatcggtcccacaccttgcccccacaaaggaggtgtcgcttgaacgataaaacaggatttgaccgaatttacaagattgacccgaccacgatccgatgtcccgggctgctgaaatttatcgcgggaaaattaagatatttcgaccattctggaaataaagcccatgaaaataagaaaaccaaaaccatgaaaccaacatcacccaggaggatgcccgaaaatcagattcaaccataggatagagacaataaacagaaatgttacaaatttgtaattttttatgatgaacgcagtttaaaggtggacgtttgatgacgcccacggaatatgaaacttaggaggtactaaaatggatattcttgacgatttacgaattacaatctccaaactttcgaagaaattgagggccgatgacacggcacccgttgaaccggcacagtacgattcacttacaaaactgacgactgcttacactgctttgcttcgacagatgggcggcggcgacgatgacaacggcaccggcaacctcagcggcaggtcggcagaggccgaggcgatgcttcagaaaatgcgcaggagggcagacaatgactgacaaaaacaaaaacgatgccttggaaaaggaaaacatcatgattgccaaaaaccttgcgtctttggcggacatcggccccgaggaacataaattatcaaatgatgataaatctatagtcgatgacttattgtcattggtaggaagggaggttgcgtagtggacaccattgaaaaattaaaaaacaagatagtcctggttaataatcagatcaaagaccacaaacaggccttacaagatgccagggacaagctgaaacggttgcttgagcagaaccttgaaaagtcccgacagccgcagtccattcctaattccaggcgtgcggttgaattgtcggaaaagcgcattgttgagttgaccgcccttaagaaggacctgagcgaacgccttgaggtgcagaaacgtcttgtctatagagatcgtatgcgcacagaggccagaaacatcggcgaaagcctggaggcgtatcagggcctgcttacggccctcgaaaaggctgggcaggcgcatacggacgccttgtcacgggtcacacgatacgtttcatcgctgaccagggccgcagactttgccgaatctttagacaaagaagtcctgccgcttaaagatagcggcttggatcttggaagtcatcttcctgctttggcacaggctggttcacgtgcgtttgaattccagattgaccagaatgaaatcgaaatcattcgggccaccatgcagagcaattttaatagattgcagtcgataagcatgggcaggagaggatactcagtggtcaagccacgcctccagcgtcagcatacggatccgatcaaggcagagcagatggatagcgtaaggtacaatcagatgcagacagcgaagtacaaaagcagatagagagtttggcaggcggttttccttcagttttccgcctgtcaatagggggcttatccacccccacacttgggaccagggactgaccacctctggtcccattttatttttatttcctgctggacacaaaatcccaaaccattgaaaagatcagtcattttaatatcaatcaaaataccagatatttgcctgttgaaatctgaaatcatggacagaacatggacagggaaaccccagaacgaaacaagggcttatgacctatgccataaacccttgattttgctggtgccgagggacagaatcgaactgccgacacggggattttcagtcccctgctctaccgactgagctacctcggcattcctgaaagcagcaactgtatctaatagacggtgaattggttgtcaagataattttaactcaattttgtatgaaaaaagtaaagaactacggcttcattcttggatgccgagcctgtgaaagcctccaactcgttcaagatccaggcattagctcccgcccatatcgccaaaacaatactgcatcaatacggctgccgcgactgcagcggtttcagctttgagtattcgtggccccagcgacatggtcacaaaccccagggatgttgccaaatcgacttccctggcagaaaatcctccctcgggcccgaccaccaccatgaggcttcttatctgatcctcaaatccaggcctggatgcaacagccgaccctgattcgcattcccagaatatgattttacggtcacaggactcaccctgcgtcatcacctcttccatggacacgggtgggaggacttccatgaaattatcccggccgcactgtttaagcgcctcccggctgatcttgttccaccgcgccactcttgcggtcaggcgcttttggtccggtgttggcactgatctttccgaaaaaaaagggacccaccgggatataccgagctccgtggcctgcctgatcaaagtatccatttttttgcttttgagcatggcctgggcaaaggtaatctgaatatgggactctcttttagacgcatgggctttttcgaccatgacagataccgcgtcaggggatactgaccgaatacggcacgcaaaagcatgtccccttccgtcaaagacagcgatgacatcgtcactcttcaggcgcagcactttggatatgtgcatggcatccgaaccgctgataacagcagatttaccaaccttgagttcctggggggaaaagaatcgtctcataaattttcacatttgttttcaaatcaacgtttcgactatccaatgggatctacttagcatgcttgccaatatgccgtcgagtgtgaaaatttatacgtattagaaacatgttcggtcacggatgatgcttggtaactctgcctaatttaaaacaactactggtttaaaaaaggctgactgtttctaatacaacttgatgaaaaatcttaatatattgacatgatagctactatatggtattgattttccattaatctctatgctgtgttcatcactcgaaatcaggtaaaacacgtactttatattcctgtggtcacttctgattcctgtaaacgggggctgatatggaaaagagcaacgatccttttgataaaaaatcggaaaaggataaagaaatcatcgaccttaaagatgaattgccttcatcggagggtaaagatgatattatcgatctttccgacactgtcgactcgtcagccctggattcagacgatgacattctggacctcaccgaacctgtttccgaggatgcctcagatgaagatgaggtacttgatctattagatgccgtcgagcctgaagcagatcaggaagcggtccttgacctcacagagccaattgcccaggaaacccctgacgaggatgacatactcgatcttttagatgcggtcgagcctgaagcagatcaggaagcggtccttgatctcacagagccaattgcccaggacccccctggcgaggatgatgtgctggatcttatggatgccgtcgagcctgaagcagatcaggaagcggtgcttgacctcacca

SEQ ID NO: 124 - DNA, 6676 bp, Artificial Sequence
  Synthetic
aaaggtcaacatcaactgtcttgtctgccacaataaaatggcagtcacgcatcagtggcgggacggaaaacctgagaagaacaccgtctatggcacaaaagacggctctcacatggataagatatacaaaaaccggaagaagagcgccacaatgacggcatccgttatgtgcgggcagtgccatcaggggccgcttattgacaggccggtaacaacccagtgttcaacgctctatggaagctatttcaatgcatacttgcctgcaggcggagacaagacctgtcaggaatgccacatgaaggaagtggacgggcactctatgttcagcttcagagaccggaactataatgaccctgcaatggttaaaagggcccttgatgtagaggttgacgtgaagaagggttacaaatccattgaacttcctaaactgcctccgtcggcaaaggttatcgtaaagataacgaataacgcaggccatagaatacctgacggctgaccttccccgaagagagtggtcctggatgtgaccgcaaagacaaaagacgggaaagaggtatttaaatccgaaaagatatacatgcttcacgcaggcgacagccgcaatgagggcgaccagatggtttacggccctgcaaataagctaagcttccttgaagaaaatacattccagccgctccagacaaagatggaaacctatgaggtaaagtttcctgaaaacgtcaaaaatctggatgtgaatgttgagctcagattccagtacggccctgaggtggggactatcggcaaggatagctgggttctctacaaaacaacaaaagaagcaagcattaagtagatgttatgtgtgtccggtatgtgcttgcacatgccggacacatctctcaccgccacggctcaatgataacttttatggattctttgccttccgcgacaagcttaaaaccaagctgcgcctcagacatgggaagtttgtgcgtaatcatatccttaacattcacccttccggccttgataaattctatggcagtttcaaggtcagaaggcgctgccccgtatgatgtcaccatctttatctcattgcgccaaaaatcattgattggaacggatacattaattccgggctcaggcaccgcgaaaaataaaatcctgccgcccttatcaacggattgaagcgcctgctcaatcgcgggcatcgcgcctgtgcatacaatcacgcagtccgcaagccttccgtcatttaattccctaatgcgctttggaacatcttctttggcattgattacattgtctgccccgaatttctgagcggcattcaagcggtattcatttatgtcagtcgcgataatcctttccgctcctactgcctttgccagattgatatgaagcagccctgaaatcccgcttcccatcacaaggacgctttgccctgcctttagatttgcaaccctctggccgcgaaggacgcacgccagaggctctatgaacgtgccctcttcgtaagacatattttcaggaaggatataaactccgctcttaacatttatctcaggaacgcggagatattcggcgaaacctccagggtcgtaattagttttgtgaagtgtttcgcacgcagtatgatagccgctcaaacagtagcggcatgtattacagggaacatggtgggacacgaaaaccctgtcgccgattttataattctttacgccttcgccgacctcaacaatctctcctgtgatctcatggccgagaactcgcggggccttttttatacgataccattccatcacatcgcttccgcagatgccgcttgccatgaccttgacgagaagctcacccttccctatctttgggacaggcctctcctcaacacggacgtcgttattcctgtaatacatcgcaactttcatagagaataatataacatacgctgagcttaaaaatttattgcaaaaaaatgaaggctatgccatatttaagacagttatttaaagaaatgaaaaccataaagaataagccccgcagagcagttcctgcaaacccatctttgcgaccgtttaaagaggcatgggacgatatagaaacctcccttagaaaaataaaacctcattttaaaagtgtcaaagaggcaatggcgcaggcaagaagaagaccttcttcgtaattaggagaagctaatggagaaaaaagaacttgtattaggtattgattacggcgggaaatacaccggcattgcaatggttgaccgcaggaataatcaagtgttgtaaagatggctatgatgtcaaaagaatcttataccctcggcattgattttggaagccagaatattggcatagcccttcttcgccacaccgatcaaaagcccaacgaaccgatatatgccggaacgcttcgggttgatactggtgggcaagagggacttcctactaaagtaaatgaccgtaaaactgcaaggaggatgcgaaggacgcagtccaccaagaaaaggcggttaaggcttttaagggattccttgaactctcttggcatcgatgaagatgcgataaattctattatctctttttcaagaaggagaggttattcatgggtcaaaaatgatgaaggtggttatagaaataaaaataaaaaagaagatgaatattttcaatttggagtaagcagaaaagacagctttttacctgcacttcaaatagagatagaaaaatgcttacccgaagaaaagagagaacaggtttttcagatatgcaaaaacattctcgataaagaaccggacgatgacattagacctgttcgttttgataacagaaatccaagtaagtgcagatgggacgatggggaaggtggctgcaataataatgttccagcagcaaaaaatgctgttgacatgcggctcaatcaatctctttatataaaaactattcctgtttttgattcactgaatgagaataagaggcaagatttttgcaggaaccttgattcctacatttcaagatttgccgaatttgcgtataaatatcaaaaagcatttaaaacggaagatactggcgtgcttgatgcattgaaaaagcaatattcaaataaaggcgataagtttaaaaaactatgtggaagctgccgacaagttaaagaatgttatctgaaaaagagaattgattttaaagattttcttttcgatatcgaaaaattttccgggaaaaacttcaatatgaaggaaaactttaacggctattatcacaaagagattgataatattgtattgaacagtcaatcgggcagattaagtttttgcagagaacattccgatgtttatatccaatacatgctatctcacaaagatattccttataagcagactattgaagaaaaagacataaaatcccgtcagcagcagatacttttcggcaagatatggcggtttgttgaggcaaggcttcttcccctcacaaacgggaaaatagatagaatagctgttgaaagaaacgcctttgaccttctggcaattccttttgaagacaagacgaaactaagtgagagaaaggtaaatgagctttactggcatggcccccaatatggttataagagtacaaaggaaatgctctttaaagaatttgatggcaactgctgttattgcccgaacaaattccctgaaagtgagtttgtagaggttgagcatattctaccgagatcaaaatttcgttttgacaattattttaatttagcgcttgcctgcaaaagctgtaacgctctaaaaggcaataagaccgggcttgaattcaagcctattcatccaaatgcatataaggcttactctaaatatgttgatgcccgagaaggacagaacttaaaacatatatttcatactatcaagaaaggaatattgaatcttctaacaagaggggatgcaaaagccgaaactcaattatcgataatcgggcaaaatctttttgaggcgacgaccactcagaaagggccgagaccgctggcaagattcctctctcagcgaataagtagtatctgcggcaaggctcctgaaataaagcttcttaacggaaggcacacggcggtctacaggagattaatctttcctgacttcgataaacttgccgaaaaaaataatgctgaaagggaagatactatcaatcatgccattgatgcaatgcttgttgcttttcagatgccagattacgcatggcataaaaagggttttcatgattataaagactatgaatattgggctaatagagtaaagaatttcgctcctgagaaagatagcgaaggattgcccgtattcagtcctgaacgtcatcccaagcccatattaggttttgagaaaccatccgtagtaagttcaaattattattccatagacatcctgagcacttcatggaatagaaggcatatggctacgcataaacaagagccatacggtatgtcaaataaaaaggatcctacaaaagaaggagtgccgataagaaaagagcctgcatcaaatatcgtcaaagaaattcttgatgcagaaaataaggagaagctgaaaaagtttatagatagaatttcgcatcctgttttaagggaaaatcttcttctcgcgttagaggaagaacattacaaagaaataactgcatgcatgctcgtaaagtggcttcaaagaactattagcaacacggttgaaaaaagccgtgaaaagaaaaaatcgtatttttcaaaccacccgagttcactgcttcgtaagaaatatcttgaagattttgtatgtgctgatatagatgacatattggtgtcgcctcaggcaaaaattccaccgaatatcagcataagaatggctgtagcttctaacatgaaagggcagattaatcttaaaagaagcgacaaaataagaccggatagattccatcattatatgtctcaacctaacattaagatgaaaatcgttgcttataaggcaaattctgctggagttatagacagatcaaatcctgctatccttgaagtgatgcagagttggcaggtgctgaataataagaaagaaaaaataattgaggacgaaaatcatgtcttgaatggaagaatcctttcaaacggtattaaggaaaaagatttccttatgaaatgggaagcagaactcaagaaatatttcgcatctaaatcctttaaggaatggcatcgcattactcagggaaactatcttgaatacgaaaatggagacggatttttcattagaaatttcaaaaaagaaaaagacggatataaagatggcaatctaaaaggcatcgttaaggtctggcggtcgccgtataaatggctggcaaatggtgatagcgcttaaataaattccttttagatggccatcataatttaacctttaaatatcctaacccctatttggctaactaagcgttgcattattcatgcaagaggcattagctggagtgccaggggcgttttacagttttccaagctctttgattttcgcaaacccctcagggtttatttcaaaaaatagcttttcggaaaatttttaaacttgcactgagaaacccattgaatctacagcaaaatgtgagcggcttcaatctcttttatcaaagaaccctaactgtaacataccatatattattgtgagcatcccactgcgccagcgcttcaatctcttttatcaaagaaccctaactgtaactacataataatgtatccattcttttgccctcctccagcttcaatctcttttatcaaagaaccctaactgtaaccacacaacgccttacttacccttttgccgagttctgcttcaatctcttttatcaaagaaccctaactgtaactgaatattacgatgcgaaacttgggggatattgggcttcaatctcttttatcaaagaaccctaactgtaactcttgcagactggcaagtcaatcgtaacatcgtcccgcttcaatctcttttatcaaagaaccttaactgtaactagtggaaaacatctctatagacggcggcaacaagcttcaatctcttttatcaaagaaccctaactgtaacatcatctggtcattttagtttctcaataaattctcgtgcgccttttagggcgctcctcactgtatcaactctatgaagcataccacggtaataccccgcaatatgaagctcctcatacaacgcatcaaataaccttgggagtttgccgttatggatagtagcatattttttaagggctttctcgtattcttccacctttttgggaagatcctttttaggcactcccctctttaataggtatgcattgatcgcctcaagcacaccgagataggctacgccgcatgcagattttacgtatttcttgtcgacgtatatgccttcctctattgctgttttgcttaacagttcttttgcattctgcaaatatctaagcgcctctttctgcatctatttcgctccctttgcgttctcaaagtatctggtagactctttcatggttctgttatatgattgcattataagccgaaaatttcaagagaaccgctaatctgcttttagtgcctgcttagttcttctttgcttgcggtgacgcctttaatctttttcggagattttttagccgcctttgccttgaggcctttgtaaatctcataagcagtcttgggagtggcgttgtcatggaccatcgcccggacagcc

SEQ ID NO: 125 - DNA, 14403 bp, Artificial Sequence
  Synthetic
gtgctgttttagtcaccggagaatggacgctcggccgcaacgcggcggtaggggaaccaaaacagccgctggttttagtcaccggagaatggacgctcggccgcaacccggatcgtaagccacctccgcctccagcgttttagtcaccggagaatggacgctcggccgcaacgctggtatcgaccttgcgttttgttgggtagttttagtcaccggagaatggacgctcggccgcaacacattgttcgcacctgtgaacgtcgctgacgttttagtcaccggagaatggacgctcggccgcaacgcggcgtcgcgcgcggattgaatggcttgcgttttagtcaccggagaatggacgctcggccgcaacgcgcaacctggttggaagcactctgttgaggttttagtcaccggagaatggacgctcggccgcaacggggccggccgccggacgccctttcgtgctgttttagtcaccggagaatggacgctcggccgcaacgacgacttctagccgccctgctagaatctggttttagtcaccggagaatggacgctcggccgcaacgcccccggcggggcggaaacgtagcccgaggttttagtcaccggagaatggacgctcggccgcaactcaaaccaatcttgtcgtagacacgcgtttgttttagtcaccggagaatggacgctcggccgcaacactctatcgtgtcggcatacgtactgccaagttttagtcaccggagaatggacgctcggccgcaacgagacgcttggcagatcgtcacgcctttgcgttttagtcaccggagaatggacgctcggccgcaacggaggcttacgttaacaaccgacgtgtaggttttagtcaccggagaatggacgctcggccgcaacgtccagacgatgctttcaattgagcgcgtggttttagtcaccggagaatggacgctcggccgcaacaaaattgcaggaatgtcgctggctccgagagttttagtcaccggagaatggacgctcggccgcaacccaattgcagcaacccgtttgctggtaaagggttgccgcaataaaagcacaaaaaaaccgtggcttgccgggaaaaaattcccagaccaagtgcggttttttttcactgggtgcctttcgggcaatgcggccggcgcgatggttcaacttggcgaacctggcaatgacgacagcgatttttagagcacaacagcggcatgtgcgttacgttgactaccgactatggttcgcgcaacatcgggctggcgttgatgcaagctcatgccggtcagcgtccgacggccctctatgccgcaaccatcatcgtcgagcctaagcccctgaaggagctagtggttcgtcgtgcccaactgcggcggatgcgccgtacgcgcaaaacacgtcgccgtcgtctgcgccggctggccgatgcgttgcggggcatcgccggtgcggagacgatagtgcgtttctgccgtcggcggggttattcgcacgatcccaaacgggaacgggaggggcgcggatcggacgactcgaacagctcggagaaggtgttgttcgccgtttcgcgcgaggagttcttcaaggcgctggaagccgaggtacagcgcgttattgccgagccggaccgccagcgcgtactggccgcctgccgccgacacctcaacgctgcgcggctgcctggcgccgagttgcgcccaccgcgcttcgacaaccgcgccgtgggccggtgcggctggcaaggctgctcgcgtcggccgccgcgggccgaaaatgccgtctgggagtgtctgcgccagacgctctacggatggttgaagccggtcttcgacgaggcgctagcgaatctcgagcaggccgaggctgccaaggccagggccgcgatgtgcgccgaggtcgatcaatggtgcagcgcgttggtaaagctggccgccgagtaccgcaagctggccgaccaacagcccgcccagcgcgacaaaaaggacgtcgataagacaatcgccctgctgacacgcagaaagaaacagctgtatcggcagatcgtccgctgggtgcaggacacggcgccggccaaagctggcagaaagttcgccgcggattttgaagcctacgtcggcaaaaaaggcggcaagggcaagcagaaatcgggcagtgtctcggccgctggcgcaaggcaagccggcgtccggcagaaaaagaccaaacgcggcttccgcaatcagctggatgatatcgtggtcaaaggccggtccggccggctgcggtattgccgcgagcactcggcccagtacatccagtatttgcttgatggcaaacagattcccaaccgggaagacgttctggaccgcgacatccgcagtcggcggcagaagatcgtcttcgaccggctgtggacgctgatccgcggccggctgctgccgctggccggcggacgcatcgaccggattgtggtcgagcgtgtggccttcgacgtgctggccggccgcttcaagcatcgccaaaagttctatagcggcaaagaggaaagagcggccgagatgtattggttcgggccgggttacggcttcgacagcgagttggagatgctccgcgaagagtttggggggcgctgcgcgtactgcggccagcaatcgcaagacatggaggtagagcacatcctgccccggagtcggtttcccttcgattcatatctgctcaaggtgccggcctgccgccagtgcaacatgagaaaaggcgctcgttcgatcacggaagccaaaatgcgcatacacccggatgcgtatggggcatacgagcgatacctggaaaaacgcaacgtgcgacattacttttgtgacatcaaaaaaggtgcgctgaagctgctgaccaacggaacacagaattgggacgcggagcggctgttgggaatgatcgcccagaacattcttgaaatgggcaagtcgcagaacgcgtcgcgtgcattggcgcgctggctggccggaaagctggagcgcgaaaccggcgtgcggccagaggtggtcttccgcaacggcagatatacagcagcttgccgcgaagtggtcctgccggaatacgacaagcctgctgaaaagcgcaaaggcaacacgcgcaaccatgccgtggacgcgatattactgggctgtgattttcccgcggtcacattcgtcgatgcccagggaaagtggtggctttcggaagaccgattgcgccactgggaagaacaagtcaaggccgccgcgccggaattggtagaactgccaggccagggcgatgcgccaccggcaaaactgccgcgggtcgaagcgccggcgccgattcggttcttcgaggaggacgttgggggtgggtatttcaaaatcgatctgtcggcctttgggtggaatcggcgccggcaaagcgggacgaaggttgacccagtgcggaaaatcacaaccgcaaacggcacgcgccttgccaagcgcgagccggcgcaagcggtactggacaagctgctggcaaaggaaaaagatcgcgataagtgcattgcgttaatcgccaatcggcgtctgcgccagttgctccagagcgatccggacagcgccgccaggaattacgtcctgtggcttcagcgccagacagccagaggactgcgcgcggcgaagatgggcaatcacccggcggacataaagcggcgccaaatgctccagcagttcatcaacacgccagttgatgctttcctgcggccaggcaaggagcggtcggcgcaggacgccccacaacaggcgcaatccgattatgcacaaattcccgaggtcatcggtgtgtgttgcttgatcgaccagggggaaatcaagtacgacgtgccgcgttgcgaccgcgtcgggaagccgattcattactacgccagccagccggcaatacgcgcattgtacgttggatacaaacgccgcaaagacggaaaactggaccgctccaagccggtgattttccgcgtcaatcaggtctggaaggtgtactacggcccgcccggcaaggaccaagacagccccgcggcacgcgaggtgatagagaaacttggacaggacagtccgctgcacggacgcatgctcggacagcgcggctcctggcagaagttccgcaggcgatggcacgaggccttcgacagactgtgggccgacttgggcgtggagaagcgtttccggattgcccagggcgcggtgatcgaaaagaccgacggcacatgtttcctggttcgcaacttcgatacctccgagccttggatgaaaggttccccctggaagaacattcgccgcgtatatcgctcgccgttgcactatctggccgccaaggccaaagcggcatcgcacaacgccgctcagaccggcgcgcccgttgccgaaacactcagctaatgcgacggcgccaagttgcccattcgtaacagcccgttgttgtgcaagctgcccttgcaacacaagatattgcgttctattgcaagttagcgctgtggtttttcgcggcgcggtcgagcgcccttttcagggctttggtttgaagtaattggccttttttcccggggctggcggctctggctatcgacgttgcgccgctccgcagcgggatgagacctccaagcttgtgtgcttcgattttgcaggcaggagttgtgccagcaatcagatgggtagattgggaggagacggcttgtcgacggccttgcggccgcggctcggttttggcacccttggcaaacgatgagatgggcaagcgtttccggcggaccggaacatgggtaagcttcttccccgaagccgaaccaaccagattttccacctgcaatcgagatgcacacacgtcccctcatggcaatccgattggtctttgtgcgcaatcagtgcggagttatacttttcgccagcgcatagggggcatgtcgtttccgatcgtcgaacgtacggctggtaatagacctcagcggcgatcaagtagcggtcttagcgggcgaagcacaaagttgccggccgcgcaggatgttgggggctggcgaaatgtgatgtcgcgcccacagcgattgggaccccgctggtcaatgacaaccgtggcctttccaggcacaccgcaacagattatatcgattgactttgtgtctttgtgtctaggtgttgcggcaaccgctggggcgcctgttaaggagggaaaatcggcatgggcatggaagccgctgcgttgccggtggtaagtgccggtacggtggagcagcttcgcacggcacggcaagttctgctgcgcgaaagccaagcgctggcccagcttgccaatcggctgggcgaggagttttgccgcgcggtggacttgttgtgcaaatgtcagggaaaggtggtagtctcgggcatggggaaggcgggcctgatcggccgcaaaattgccgccacgctggcctcgactggcactgcttcccattttctccatcctgccgaggcgctacacggtgacctgggctgcatccggcagggtgatgtcgcgctgctgctatcgcagagcggccaaacgcaagagattctacgcctgctgccctgcctggccgagctgggcacgccgatcatagccataaccggttgcgccacaagcagtttgggtcgagcagccacggttacgctggaaatcggccccatccaggaagccgatccgctcggcctggcccctacgaccagcacaaccgccatgcttgcactgggcgatgcgctggcgatcgtcgctgcgcagttgcgcaactttggccgagaggatttcgcccggtttcaccccggtggaactttgggacgaagactggccaaagtggaagaggccatgcgcccgctggagcagtgtcggctggcgcacgaggggctttcggtgcgggaagtgcttgtcagcacccgcctgcccggccgccgcactggggccaccatgctggtggacgattccggccggctgagcggcatttttaccgacagcgatctggcccggctgttcgaacagcgtagggaaagcctgctggacagtccgatccgggcggtgatgacccgcgagccactgcatgtgcagcaaggaacgacgatgagcgaggccatcgacttgatggccagacgcaagatcagcgaactaccggttgtggacgccgaaggccgaccgctgggactaatcgatataaccgatgtcgtcggtttgttgccaaaagattgcccagagcaccagctctggccaaccgatagcgcatgcaccccaaacagcgggaaagagggtacgtcgggaataatgcctgcggtttatcgcatctacagtgaaccggccgatggtcggccagcgtaatcaatgttgccagatgttctatggagccatcgcggtttcgagttgtggcggtgcagcagcgcgctggcgtgctatcgaagaaccgccgcttgccacgggttcgaccgggcgaccgctggccgccaggcgctcagctgaatgtctcggccggtcagtcaagcgttttggaagattggtgtagcccggtcgatagaccggtcgttaatgtttgaaccacacgggcagtagctctggccaatccggttggcgcgggccgcagtggaaggcgttcggaggagaaacgtctcgcttcggcccgcgcaaagcacaattcctgccagcgttgatgacttccagcaggccgaaactgctgtttgcttcccgcacggtcaaggcggccgtcagtttcgcggtggtgctatcgctttactggctgtatgcgttgctggccgtgccgctgatcgagccatcggcagagccacatcgggcgttggcgcagtcgggcagccagagcgccggcgaagacccgcggctagaggagttgcgtccgctgtttccccccgatgcctgggaactgcaatcgcccaagattatcgaaagcgaccagctcaagctgctgatgcaggaaccgcgcagcctgggcgaacgcagggttcaattgcgtccctgcacgatgatattcctgcccagcaaagcgggactgagttaccaggagcgcatcagacaggcagtggtgctgcaatcgcccgagggcgcaatactggagttcgatcagccgctgaatttgcgccggatggaaatggggcgactggtaggcggagaacttaccggcctggtgaccatccgcagccaagggcaatcgccggggccggaagacgatctgctgatcgttgcccgcaatgtgcagatcaacgagaaggaaatctcgactgtaggtcgggtggagttccgctgggggcctcacttcggaagcggccaacacctggtaatgaagctcgccccggccggcggcgatgcaccacgacggggagcaaacatcggcggcctggaatcgttcgagatccgccacgtagaacgattgcacctggaagtagtcgacttgcccggccaaaagccgccgacaagccctcgcccgcaaccgcgcacggccacgccgatcgaaattacctgccgtgggccgctgcgtttcgatccggtccgcaaggaagcgactgttgaagaccgggtgacggtatggagcatgggccagcacggggcggacaatcaattgacgtgcgacttgttagtactggcgctgggcgatcagaccgacgcccgtccgcaacagcagcagcatcggcagccacagcagcatcagcctcagaatcggcatgaggctgagcatcaggagcatcagcaacggcaccagcagccgcaacagcactcggccagcagcgcccctggcggtgcggaagccggacaatcgaatcaccggggcgatcggttttcgttgagcctgcggcggatcgtggcgcagggcactccagccgtagcgatggttcccagccgccagcttgccattcgcgcccgacggcttcaatacgatctgctgctccagcgcgtcactctcgagggcgagccggaagtgatgcttcgacaaggccccaacgaagtgcgagcccggagcataatctacgaatctgcggacgccggcaacctggggcgacttttcgccgatggccccggttggctcagagcacacttgcccgatcggcccgaccagcagctttacgcccaatggaacgaacaccttcgctttcggccgcacgaacataatcaattgctgtcgctgaccggcggcgcaaggttgcgctttcgcggggtgggcgaagtgacggccagagagattcacttctggttcaaggaaaatcctgctccgagtgcgccggctgctgtgccgagtgcgccggctgctgtgccggctgtgccacaggcgtggcccaagacggcgcacaatgtttcggcgcgcgccgcatcggcgcgtccggaagaatcgtccccccagcccagccgcttgcgtcccgaccggatgctcgcccaacacgatgtggtgatcgactcgcagcacgtaaccgcgcggctggagcagttgggggtgtggttcgagccgagagctccggcaggccggccttcggcgggggcaacgggtggattgggcagtggcgccgcagttgtcagtacgtcttcgcccaacgaatcccgattgatagcccctgttgctgaggccgtcgcgggccacaacgcgccttatgcgctttgggcggtcaataacgtcgcaggccgcaatgcgccctctgctcacccggcgcccgatgatgtcgcggccagtatccctggcgaccaagccagggcaaacagtacgtcggcaacggggttgcgcgggctgctggcagaaccccgtaggcgattcgaagcccaaggcagatcgctgcgggccagagttctgttggacgaggacatcggcacttccgccggcagccagttggcaccgacggcagaagtgcccagtcctcatcaccacagcagcgacgccgaaatagccgagttgatcctcgaagacgacgcgagattcgcggagtcgcttgccgcaggaacttcggccgcaccggtggtcgtcagcggccagcgcatccacgtggtcgaggctagcagaccgcacgccgccataaccgtagtcggacgcccggcgctgttcgagggacgaggtctgaaactcagcggcgggaacatcaatctgaatcggggcactaaccggctgtgggtcgatgggccgggagaattgcaactgccgttgaagcgaaatctggacttcccgctcaagcaacatctggaaaaccagccgccggcgcaacccggcacgctgtgcatcgattggcggcagcggatgcacttcgacgggcgatcggcgctgttcgaacagtcggtcacggcgcgcggcccggacatgatactttccaccgaagtgctggaagtgcagttgcagcaggcaatagtcttcgccgagtccggccaggactcccagccacagatcgaacaaatcctttgccgggggggcgtgacgatcgaaagtcgccgcctgcgggaattggaattggtatcgctgatgcgcgccaagctggccgacctggcatggcacattcccagcggggcgattaccggcggcgggccgggctccatggtgggagtgttccgcggcactggcccagcgaaaactgcaaacctcgtgccgcccttcgctcagccgcggtcgccacaagctgcggccgcgcaagaccgctcgggcgccccgctggattgcctgcacgtgcgattccagggttcggttcgaggaaacaccaacaccggcacattggggttctacgaccgtgtgcaagcggctttcgcaccagtaggctcctgggatgcaacgctggaagtggatgatccgcgagcactggggcaatatggtggcgtgctgatcaactccagttgtctgaccgtgaccgaaatgcccagtcccccagggaaccagcgaaccctcgagctggaggcgaccggaaacaccatcgtggaagcggtcagcgaagaccagcggctctacaccgcccgcgcccagcgaatcgcttatgcccaggcaaaagacctgcttgtcctggaaggcgacggacgcaccgacgccgagctgttttatcaaccccaacccgcagcgcaaccctcgcgtcaagccgcgcgcaggatcatcttgtttccccgttcgggcaaaggttgggtcgagggtgcccgcagcctggagctgaccggctttccccagtgattcggcgtgaagatgccagccgctccacggctggccagttgttgcgacccgtcgccggcgcagcattgcttcgcagcaggacaataatgcggcccgcggccgcaaccaaactatgttactggagggacgcgctgcggtcgcgtccgcaagccctcggggcacggccacgacggagcgtgtccctccagatcactcgaaaacatggacgcaaaaggggcacaggtggtctcgtaaaggtctaacacccaatgacgcctaacgagcccctgcctcaagccggttgccacaccaggaacaacaactgcattggcggttggaaatcaaggcagttgccatgtaatggacgacaaccgcgatgaggttggaaatgcggggtttcttctctctaccggtgtatcaagtacaattattgccactggggcgggataagcggaaaaccggccagcgcccgcgcagcctgaacgggtcggttagcagtacaccattctggtagcagtgcagcttcttggaagccacaacggctcagttcggcctgcgcgaggcatatcgtacgaaagtcccgcgtgcgggcctggtcgatgccagctacagttgagcagttgaagtatccgccaaaatatcggtgagccatcaaaatgaagactctactgagccaagaacaactcagcgaaggcattcgccgcctggcagagcaaatccagcagcgatatcaaggcaagccgctgacattgatcggcgtgttttccggtagcgtgatgctgttggcagacctgatccggctgctggatatgccattgcggatcaatgtcctggaagagcggcgcagtctccggggcgatcgcccggggcctccggccatcaatatcgatcaactgcgctgcgatgttgaaggtcgtcacgtgctgctggtcgatgacatcttcgtcaccgggcagacgctctgggaactggtgccgcaattggacgaattgaatccggccagcgttcacagcgtggtgctgctgcgtaaagcgggattgcaaacctcgccgatcagcccggacttcgtcggcttcgatataccagccgacgtttacgtggtgggctacgggctggattaccaggaccgctaccgcaatctgccttacctggccgcgctggaacctcaagaccaataggctcgatagcagtgaagccactaaggctggtgttggtggtgcgccacttctggccgattctagacggcccggcgcgactgacggccgaacttgccgcaggacttgcacgccggggatttcctgtaaccattctgaccgcccgttggtatgaatcctggccggcagaaatcttctttcgtggcgtgccggtgatgcgcattgggccggcgccgcgcggcggctggcagacggtgcgctacttgcacgctttagcctcgtggctgcggcggcgccgcgggcagttcgacctggtttgtgtttccggcgccaccctcgaggcgttcgccgctgcgctgggcctgcgcggcagccgccctcttgttataagagtagaacgagccggccgcgcaggcgattgctactggcaggaacattccagttgcgggccgcacgtcaaacgacgctgcgcagaggcaacagtgctcgtcgcgccgtggcctggcgtggtcagtgaacttctggcacgaggttactgcggggaacgaatacggatgatacccaacggcgtggctattccgccggaaagcgacaattcgcaaaagaccgccgcccgggccgtcttgacacagctttaccccccggcacagatgccgccctgggcgccgctggccgtgtacgtcggccgcctggactgccgccgcgggttgtccacgttgctgcaagcctggcggctgcttgccggccgctggcccgatgcccgactgtggctcgtcggcgcaggtcccgatcaccatcacatccaacaaactgtgcacaccctggcattggacggacgggtacacctgctgggagcgttcgactgtgtggaccagccgctggccgccgccgacgttttcgtgtggcctgaccccgagttcggaaccggcgcggccattatggaggcaatggcggcaggcttgcccgtggttgccgtggatgccgagccggtgcgaacgtttattggccaggatatcgctggtgttcttgcggctggccagaacgctcaagcattcgccttggccatcgaccggctgttcggcgccccgcagcttgccagtcggttgggggcagccggccgacggcgcgtcgagcagcagtactctgccgcgaaaatggtcgaagagcattcgaagctgttcgagactctggttccacagtgaccgtacgcatccttcacatcatcgacagactcgactgctacggccccagcaggcaattgtcgctgctgatgcatgggttgccgcccagtcagttctgcaatcgcatcggtgcgctgaaagttgcggccgatctgcccgaggaactggccgccgtaccagggaaaatctgtgtgcttgccagccgggggttgctcgatccgacatggccggtccgtctgcggaggttgctgttgcactttcgaccccagataatccacggctggggccgccgcgccaaccttgtggcggcactggccgccgttgtgcagcagaaggcagctctgatcgtcagccagcggtgctcgctggagcaatgcggctgcatcgccctgttgcaggcggcgatgttccgaagggcgaagaagatcgtcgtcaacagcgctgccgtctgggatcaatgcgtcgcctgtggcattgcgaaggaaaaaacgacgctcatctccaacggggttgttccccttcagacgccgccggtctcgcgtcgccaattgctggccgagcttggcctgccgcccaacgcacggctggtgtgcgcgggcggtcgcctttattcccacatggggatcaaagacgccatctgggcggccgacctgttgaaagtggtccgaaaagacgtgcacttgctgatcgtcggcgatgggccgcagcgcgaccggctggtggcgttccgcgatcaggtccgcatacaagacaaggtacattttctcggctgccgcaacgacctgcgctggatcgtcgcccattgcgacgttttctgggctgccggccaccgcagcgggcagcccaatgccatactggaagccatggcggcatcggttcccgtcgtggcgaccgatgtgcctgctaacaaacagctgcttcagcacgatgttacaggctacctgatcgcccctggcgaccgtgccgcgctggcacggctcaccaatcgattgctggatcagccggaagtggcagaacggttggggcgagcggcccgggaccgcgccttggccgagtttagcgcagccaagatggtcgctcggtacgcccagttgtaccaggaagtgctttagtcgcctccggcactgcacaaatacgccggccaacggctacgagtgcatggcgcttcggcccgcctgacaaccagctccacgagtcgtaattatgctatctgacactgcgcagccatgagcctgcgctctggtcggtgttacgcccagcagcgggcggtaaacagttcgatttccagtcgcagcagattatcgaccagttcggctggcgtttgcggacggcggagtgggtctttggcgatcatcgaatgcaccagccgagctacatccgccggcacccaaggcgccagcttccgaagcggcggaacagccccgcaccggtgcgccgctaccagctcgccgatcgtctgcccctgatacggtagtcgcccacttaacagctcgaacaatatcacccccaggctgtaaatgtcgctgcggatgtcggccgccagcgctgatgtgaaccactctggggcaaggtaattgcaggtgccaacaagccaccggtcggcgatcgagccgctttgctcgatcggtcgggcgaaacccaggtccagcaatgttacatggccgttgggactcaccatgatattgctgggcttgacgtcgccgtgcagccagccggactggtacaatgccccaagcgcttcggcagtctggcgagcgatccacaatgcctcgggcagatcgaactgctggccccattccaaccgctgccgcagtgtggccccgtccagccacggcatggccacccacaagggctgccgacgaagctcggcgccgaccaccgacaccaggtgcctgtgagccacacggcggcccacctgcgcttcgcgatgcaacaaggc

SEQ ID NO: 126 - DNA, 5955 bp, Artificial Sequence
  Synthetic
gtagcaactgtcttatctgtcaagaggccaggtgttcttgccaaggttgctggttgcggaccatagcgttgagaatggtcaagagttttcgcatgcaagccacgatagcgagttttttgggtttaccgtgttggagtaatcggagatagaaagcctggagggtttggttgaaccggatgccgacgagggcggccatatatagtttttctcggaccgcggcccttccgccccaggtgcgtctttttcccttaagctgtccggagtcgcaagccagaggggccacgccgaccagggcggcgatttctttgcggttcaggtcgcccagttcgggcagggcggcgatgagggtccgggccacgaccgggccgacgccggggacggtggtcaggagtttttctttggccgcccaggccgggctttggcggatgcgctgattcatctcctggtcgagtcttttgagttctgcttccaggtaacggatatgggcgtcgatcatggggtgtagagcgggcagggtggaagcgcggcggtttttctcggcgacgatcatgtccacgatctggcggcggcgagagacgagttccttgaggaggagggcctcctggtccgggatgggccttaaggcgggccggacgctttgggcgaagcgggccagaacgaggctgtccagacggtcggtcttggccaggtggccgagggctcgggcgaaatcacggatttggcggggattgacggccgccaccgggagtccttccgcggccaaggcggtcagggcgggcagttccaggccaccggtggcttccaagacgatgagggcgggagaaagggcggagaggcgccccgccaaagccgacagttcctcagggcggttgggcgtgcgccaggtctgaccgctggggaggacggccaggtcaagatggtctttcgagacatcaataccgatgaaaacttcagactccgagggcttcattttccttctcctttccggtatattggcaaagagggcttggtcttctccttttgtcccggccttgcacatgcgggcttgccggcccagacaactgtacgggataaggagagaaatgcgcccggcgacctcgctactgagcggtcttggatgacccaggggcgagcggcctgccgggcgcaggccggtggctgtcttcgttcgctaagctcactcagccagccaccggccacccctttttgctcccctcgattcataaactatctctagaccaagatacaaggggcggacctgcgtgtccgccctgattcctccttccccccgttgattgtaggggcaggcccccgtgcctgcccttcgacaatacccggcccctgtgtccgctctgatcccccttccccccgttgacggggggataaaaggggggcagactttttcccttgcccctcttcctcaaaccgcctatcatcatctttagggaaggaccatcgtctctgctccgctgaggggaagcggaccactcgcttgactttcccgataaaatgagctactataccttgactttgggaggcgcggcgtaattcctgataaatcatttccaaaccccactggcgttcccggtagttggtatggaaaatttcaccctcgccattgatttcggttccgtcaatatcggcttggccctggtttgtaatagggacggcgtcaacgaaccactctttgctggcatcattacttacagcaacgaagtcttgaaaaagaaatccaatccacgcgcccagattaggcgcctgcgccgaacccgcaaaaccaaaaaatccagattaaaccgtctgagacaagccctgttttctctcggccttgaccaggacgtagtcaacgccctagtccatttctgccggcggcgcggctataaagccctatatggtgcagaccgggaagctgaagaaaatggacaggccgaggaaaccgtcttccgttattcccgcgaggaattcttccgcgccctgaataaggaaatcgaccgccttctcccgcaggacctgcgtcccccggttttaaaggtgtgtgatcgcgtccttaaccgtcacggcgagttgaaccgcgaaatcagacccatccgcatcgacaaccgaggcgcgtcccgatgcgcgtggtccgagtgcgacaaagtcccgcccaggcgcaaaaacgccatccgcgacgctctggcccagttcgtttacgccattatcgacttgccaaggttgagaaacgacgaaaacctccaccgcgacctggacgcggccctggacacggtggcggagctggccaaaagactgcgaagtgtaaacggccacgacccggaccgggagaaaaaggtcttacgcaagcggattcgcgaagccttgaagccggtcaaggacctggccgccttggacacctggaaggtcaattccgagaacatcatgaacctcctggaaaagagccagggacgcaaccgctattgccgtgaacacagcggcgaatacgtccgctgtcttctcgaaggccggactgtgcccttcaaggcctccttggtcgaacgcgacatggtatctagacgggaagaaatcctttatcagaaactttggcggtacattgaaacaaggattctgcccctggcccccggcggcatcgaccgccttgtagtcgagcgagtggctttcgacctgctggccggcacacgcaagcagcgccagaaggtcggtgacaagacggtcgaggaaagctaccaattcggcccccgccatggcttcaaaagcgatctggaaatgttgcgccaggaattcgacggcctttgcgcttactgcggcaagccgtccggtcaaattatccagcgggaacacatcttgccccggggggactttctctttgacagttacctcaatatcctcccttcctgtcctgcttgtaatcaagtcatcaaggccaaggcttcgccccaagccgcgggtctgcatgttcatgaaagcgcctatcaggcctattgccgctacttggccggcaagttcaagatccggccgccccatgaataccataccatcaaaaagggcctgctcaacctgatgcggcagcccgatcgcacttgggaagcggaacagtacctggccctcatagccggtcacttcactcaggtcgcccaaacccagagggcaccacggcccatggcccggttcctatgcgaacgcttgagacaaagattcggccgctcaccccagttagccttccgaaacggtcggcacaccgacctctggcggcgggccgcctatcccgattttgacaagctcaaggaaaaggaagagggcggtctgatcaatcacgccctggacgccttggtcctggcttgcgatttgcccggaatgaccgccctggaaggactcaacctcaagcctaaggagctcaagtcctgggtccgggctgtgactgtggccgccccacctcccggaccggacggcgtgcctgtagcgcccgaacctggccgagccgtacccggtttcgaggaaatcctgcccggcaactatctgcgggccgatctgactttttttaactggaaccgtaaagatttaggcgtccagagtcaggacatctacggctggagcaaaaacgaaaatgtcccgaccaagcgtaagaccgccctggaccttgtggccgaactgcgcaagcagacgaatacctctggagtgaaaaaaatcatcgacactgtggctcatcccaatcttagacaagccctgcaggcggccaacaccggggacaagcccggagaacaggccgttcaggccttgatcgattggctccgccgggccataaaaccggccttggacaaggcccgattttccgatcatcccggggatcaagccagacggaaggccttgcatgactttgtttccggcaacctggacggcccccccgtaaccatcggcgtcaaaaggctctacccctatggttctggcaagaccgacctgcaaagaatcgatccgaaaaccggtcgtctggttcatcgttacatagccgacccggccaacaaagcccttatcgccgcctatcccttgaaaaagggccggatcaggagggatagccccattattctggaagtcaggcagaacgacgccctaaaaccccaaggaaaaaccttggcccgacctgcttccgggccgttggccggacgcggcctgggccgccccgcccctgatcccgaccaatggaaggccgaacttcatcgctgcctggccgaagcgggcgtggccgaatacgccgtggtagcccaggggtgcgtggtcaagtacgaagacggcagtgaaaaatacatccgtaatttttccacaagccagggattcaaaaatgggttcctgaagaatattgtggcggtccggcggtcgccttttgccgcggccgagacggccaacgtcaggctgttctgacagccgccggacctgatagttctttgaaaaatggaatagcttgttcaggctgaagctgaaaagagcatccgtccggaaggtccactccgggttagggcagatccggctcttggtcctctcctggcccttttcgggctccgagaggaagccttccggcatgtcttcggacaggatgtgagccttttttactttaccctgaacttttaaatcccattgggattcaggtcgcggctttcattcacggcctgagcgtgtttcagttaccctgaacttttaaatcccattgggatgttttgcgaagttgcaggcgtcggcagtacttcgagtttcagttaccctgaacttttaaatcccattgggattcgtcgttggcccgccgatcgctctgctccaaatgtttcagttaccctgaacttttaaatcccattgggatcccagtccattttctaacctcgcaatcggccgctgtttcagttaccctgaacttttaaatcccattgggatagatcgatagcagctgccaggcgaaccgatagggtttcagttaccctgaacttttaaatcccattgggatcccgctccgacattccatgcaaaacagcatggtgtttcagttaccctgaacttttaaatcccattgggatgttcatggcctttaaaccggcgttgtaagcgatggtttcagttaccctgaacttttaaatcccattgggatgctattccatctttttcgaatccgcgcaggctgttacagattcgctagcgcgaagcgccctttttttcacccagtgggaaaccttttcgaatgctctgctgggtcaaccaaatgatataaaaggttacttactttgcgcgaaacaatctttcagtaaacggcggcggggatgttccagccctcgccttatcccttttgctggcgggggccaactattatattgctgcgcgaacctcgtcgaccttagcttgccgcttgatgttcgcgcggattataattgtttgcaatttcgtgggccgcttcgccccccctcaccaatcccgagtgccttttcaagcccggcgaagatgaacttatgacccccatcaccaccgccctcagccgggagttgaaccgcatccgccgcaacggcctgaccgggccgaatctggtccgcaacctctcccaactctaccatcagcacaacatgcgcgattgggtcgaccgccgggggctcaacctggaagaattggccattccccaggtcgtttgcagcgaaaaactgggctgacccccttatctgatacttcgaccatctacgctgattgtggtccctccgggctggccataccccccgccacggttcgtgtttttgtaggggcgaccggccggtcgcccttacgtcgtggtcggattctgtaacggtgggattgaacccccgaccttgaccaacggcgtgttttcccggtcaaacccgccacggttcgtcgtctggtaggggcgaccggccggtcgcccctacgacgggcgcggccctatcggggttttcccgttcgaattcccatccgggccag

SEQ ID NO: 127 - DNA, 6992 bp, Artificial Sequence
  Synthetic
ttagtggatagtggttagtggatagtggttagtggatagtggtcctgtattggttcagcgtggcgggttcgggacatcatacaggggaaactgggggtggcgggctgagaacctccgcatgccgcgggcgggcagactgcgcggggtcggaaaaagggcctcggctacctcttgtcactgcgtcgcccaaacgatttcccgaacaagccaatcagcataaccaacgtctccgcgggaaatcaccggggctacccgcgatttgggaaagtccttatgcgtcgccatgttcgaggtcccgtatcatggttttcaccgttccgattaatgccgggatgcgctccatgcaaatcgtgtataactgctcggtatccacatcgaaataaccgtgagccagaacgtccctaagtcctattgccccgcgccattgcacttgcgggtagcgggcaaaaagcgtgccttctgtttggcgatcaatgttcttgaactcctcgccggcggcgatcaggatcatacagatggcatccatacggtccagtccggcctcgctggccaagaaatcgcttgcttgagagatatcggcgcagcggcggggaatccgctgcagcgccgtcaatacacattgcagtctttccagcaataaatcggaatcatacataggtcgcctcccgttcgattctcgcttttaggcgtggattcatcgactctcgcagccggacaatatccaccgggtgatccagcagaccttccagatcctgtctcagcatggccgtaatgaacagatcggggcgatcagtccggaaaaccacatcgacgtcgctctcgggcgtggcctcgtttcgggcgtaggagccaaaatagcccagcgcgagcaaatggtactcttcaccgtgttgctccttgaatgatttcaagagcccacgtaattccgccggctgcaataccgccttgctcatatcgtaacctccacaatcgtcagcatgtcgttgtcgaagacagaatcccccattttgccaatatcggacctgtcccgtttcttctataccacaacacccacccagcgtgcaatgtcagcaggacacaaggcgtttttgggcccttcacgaataggctgcccgccgaaggttcagttccagcagcttggcgaggatctgttcgtcgggcatttcggggtcccagccgtaggcggcgaagacggattggtcgagtttctggtgggccagatctagccaggtgggacgctggttgtagaggttcgtcagcgtccgcttcttcagttgcttggcacactcctcgtccttgggcaccagccgaggataacggaccgtgccgatgccccgctcgtccggatcacggacgtaccgcccccacggcccgtccgccgagccgggaaactccaatacttcgcccccaaaattccttgcgaaaaccagaatggtgtcccgcgaaacccttgtgaccgcgtcgccgagacgatttcccgaacaagccaaacagcatggccaacgtttccgcgggaaatcatcgggggtacccgcgtcagggggggttgtgctgcaatggcaatgtggtaaactcaacggctggagcgttctttggcaattcgaccatgtttccaacaggttgcggctaaaaagagccacgaccgcacctcggcaccctgggatcggacggacagtccccggccctgctgctcggatgcttcatgcgcccgacaaacgacgcggtctatgtggtgagtccgtattttttgtttcgtgtaggtcaccctactttggacgcacaactccagcaaacggcagcacgaaggtacggctccgtacgttttagtcaccctactttggacgcacaactccagctatcgggatctgggccgccgggcggtgtgcgttttagtcaccctacattggacgcacaactccagcccgggggcggttcataaccaccaccaacgcgttttagtcaccctactttggacgcacaactccagcttcttctttcgtgagcactatcggccatttgttttagtcaccctactttggacgcacaactccagcccaccgcccgaatgatcgtcggcggcaacagttttagtcaccctactttggacgcacaactccagcacctgcaccacccgctgttggtgttcgttcgttttagtcaccctactttggacgcacaactccagcggccccaggtctcgtagcccaacgcctcccgttttagtcaccctactttggacgcacaactccagcgttttggtttcgccggtagccacgtttagcgttttagtcaccctactttggacgcacaactccagcacgtcggtggccgctgatgtgctcgcctgggttttagtcaccctactttggacgcacaactccagcccatgcctgggtgaatatgttcgagcggatgttttagtcaccctactttggacgcacaactccagctttttgagctgtaccacgtttcaccgcgatgttttagtcaccctactttggacgcacaactccagcacgtcttccgcaagtcgttggggggcgggagtttgcgacgcaacatggtcgaaaaaacggacgcatccggggccatattgtagaacggaaccgcggaattccatcggcttttcgctcctttggaggtcgtctgtccgtggcaactacctttacggtctcgatcgacttcggttccaagtatatcggcattgcgctcataatgcactcgcccgcagcacctaaccgcgtgctctacgcggccgtaatcgtggtcgaggcgaagccgctgaacgcgtcgatcaacccgcggactgtagcccggcgaatccgacgcacgggaaagacccaccgccgccgtttgcgccgactcggcctcgcactcggcggtatccggggcgccgaagacgtgctgcgattctgccggcgccgcggttacgcgtacgaccccggcgaagagggcgacgagaccgaactggcgcacgccgtctcgcgcgacgaattcttcgaggcacttgccgccgaggtcgaccgggtggttcccgaacgtgaccgcggatacgttctgcggcggtgcgggaaacacctcaatgccgagcgacgcggcgaggccgaattgcgcccggcaagattcgagaaccgccatccgagcaagtgccagtgggaaggctgcacccgcaacgtgccgcgcaagggcaacgcgttgcgcgaacagcttgcccaaaccctctttgtgtggttgcggccaatcttcgatgagatcggcaacaaggggcccctccgcgacgccgtcgagcgccagatcgaccgcatggtcggactggcacgcggttacgccaaccgccccgacgccgacgagaagaaggccctgagcaagcagaagaaacgggccttcgccgatatgctcgattgcgtggccgaccacggcgacgagcggacggtcaagcggttcgtcgacaactggagaaagacctattcgaggcagttgacggctatcctgaccaagaagcagggtgggcggctgcgctactgccgccggcactcgcgcgagtacgtcgacgtgtttctggccggcaagcagcctccacaccggaccgaggtccacataaccgatctgttcggccggtcgcaacagatcctcttcgagcgtatctggcggctggtccacgcgagaatcctccccttggccaacgggcaaatcgaccgcgtcgtggtcgagcgagtggcgttcgacgtgttggccgggccgttcaagcagcgcgtcaagctatcagaggaccgcgcggccgagatgtactggcacgggccgatgctcgggtttgacagccggccggagatgctcaaagaggagttcgacggccgatgcgcgtactgcggccggaagcgcaagctctccgaggtcgaacacatcctgccgcggagccgctttcccttcgactcgtacttcaacattctcccctcttgcgcggagtgcaatcgcggcaagggtgcccggtcgctgctagaggccgggaagaccgtcgacgaaaaggccttcgaggcgtattccgactacatcggcaagaagaggccgccgcaccttttccacacgatcaagaagggaatgctgaagctgatgaccgacggcgggtcgatggcgacggccgagcggcagcttgccctgctggccgacaatctggtctcgatcacgaacacgcagaagtcgccgcgtcctttggcccggttcctcgcaaccgagattgagaaactgacaggacacgactgcaagccgcaatggctctcaggccgccacacggccctctatcgcgagattatcctgccggagtacgacaagaaagaagagaaagagaacggcgggctggtcaaccacgcggtcgatgcgatcgtggccggctgcaagctcccctcggctgccgcgctggagaatccccgctggtacaccaatcagaacgacggtccaaagcagagcgatatgcttgcctggcggaagaaggtcctttcggttgcgccggaacttgccggccgtctacctcgggtcgagcccatcgaacggctcgaattcttcgagaacgacttgggcgacgggtacgtgaagattgacctcagcgcattcaattggaatcaacaacggaagtcgggacacaagctcgacccgttcgggacgacggctgacgggaagccgctgaagcgcaaagcggccgacgacgtgttgaagactctgctgatcgagtcgaaacgcgacgggcagatcgccgctattgcccaccggggcttgcggcagttgctcgaaagacatcgcaagcaggccgcccgccagttcgtctgctggctgcaaaagacgacgcgcaagggactggccgacggcaaacggggtacgcacccgtcggatgcggcccgctacgcggcgctggaggcttttgtcaatacgccggccgacaagtttctctcgaacaactcggcgaccggaaacgagacagaagacaaatcggacgaggaacgcgaaacgatccccgcgactatcggaatccgttgcatcaacgcaggggtgaagggcagactaggggtcacccgctgcaacgcgcatcacgagaagggccaactgctggtgagccatccgcagtatcgcgagttctacataggctatgccgccggcgacgacggtacgcctgaccggagccggccgatcgtcttcagtgtcaaccaggcacacgccgttatgcgccgcatcggcagccgggtagaaccagtgaccgacgacccgacgagtgtcttgcaggggattccgctcgggggctggggtgaccgcaagggatttttggcccagtggcgtgccgaactccatgcggtattcgagcaacacgggattgtccgttggtttcgggttggccaaggctgttacatcgagaagaccgacgggacggcgttccagttgtgcaacttcgacgaccaaaaggagtggatgaagaatggcccgttcaagaacatccagcgcgtctaccgctcgcccttacggggtgcggtggaaagggccaatccttgacgcggggtcgccttggccgccgtcggtcttcgacacgccgcgttcgaaggtgtaccaggccccgtccgggtcggcggcggccggcttgggctggtcgagcagttcgcacagatcgaggaaatgctgttgacaggcgctgcgttcggagagatttgcccgctgccacttggcgatgaactcttgcggcgtcatgtgtttgcaccggctggaagcgatcgggtgaaaaggccgattctatccgccggggatgcccgcgtccaggttgcccacgtccagcgtatcggtcccaacatgcccacgcaagcgtgggcatggcacccggccaggtcttgccgcgggactattgaagctccgacgccggattgtccggcgggatgccgcgggccgagtcgaatgtcggcaccgggcggaaatccgggcggtctatgaacgcgaggttcttccggccatagtacgaaccgtaatactgcccgttcgagtcgacccaggtcaccagccgaacccactcgcgcggcgagagtttcacgtcttcgtggccctcgcgcagcagggcaaggagcttgctggcgtgggcatacaagccgcgagccgggacgtagtggacgttgccggtcttggggtggttttcgccgatcaccttcaagagtccgtgccggagcatggtctcgtacgagacgctgaagtgccgggtcatggtcccgcgcaaatcgagttttgccttggtcttctggccgtcgtggcagcggacacagtgtttgtcgagaatcggctgcacatcggagggatagtggattgggcggccggccgtcttgtcgcccggctgcgggcccgggacaaccggcggacgactcatcgcgatcagcgacttcgacccgaaagccggcgtatccttggtcttctcgtggcagccgacgcaggcgcgggtttcccccggccggtagttcacgtacgtccgctccgactgcacggccatgtagtcctcgtcgagcgcctggaagaagatgttcttgtcggccgggacggtgaagtgggccgaaccgtcctcctcgaccggtacgatcccgtgcattgttttcaatcccaggtgcgcgtctttcgagacgaccgaatgctgctggtcgtaagtgtcgccttcccagaatcgccgggccttccacgggcgcgggacctgctccagcacgcggatgtacttgatcgacccccgctcgacgtcctccatcccgcggtagacgtcggcgacgatgacccgcgccagattttcgcgagccaagtcgggatcgaacgacgaattgggtaccggcggtttcgggcgggccgccaccggaatcggcatccagcaggagatctccgcatcgcgatagaacaactcggccttgccgtcggcgcccagcaggtacagcccgtacgccttggtgtcgttccacggctggtccgggttgtgcgcgacgaggaaccactta

SEQ ID NO: 128 - DNA, 3789 bp, Artificial Sequence
  Synthetic
atgttgaacaagtgtttctcgtgagggtaaatgttcagttcgtaatggcgcatgttggactgtagttccagagctagttgtcgggcgtatttgacgctgtaaacttcatcttcttcgccgtgaaagatctgaacaggcggtaaacgcatgggctcataaggcattatccagggccagccgccgtagttccagatcactgccctaatcctgggatcgctgcaagcataggtcaaggctgcattggctggttgagaaaagcctgacagggcgatgcggctactatccactataggccaagcacaaagataatcaacgaccgccttgattgagttcaggtaccattcgagactgacaaaaagacgcgctcctactaccccctgattaatacttcccagtaaataaccaacacccctgtcccatgagtgtgggcttggggcaagccattcaggatggtttgaaggatctattaatacaacaacaaaatttcggttggcaagttgccggcagtaatcgtgaaactgggggacctgtgtcgctccgacgcccgccgcgacgataactgctggtgtaggactcacagagccttgcccttgcacgaaacaatagacaggcaatctctcaccatcatgcaatggaatcagagtcttgaaactgttgcccgaaccggcttcggagccaaggggaagagatatcagaaaagataagacccaccaaaagaacggtctataaaagtgtctcaacaagcgacctcagcaaaaaaattccaaaggcccatgatgcattgctccgccctattacggcagagggcccgaattcacatttcgtctctgctaccacaaaatagacataatttcaattggtaaggtcattgccttgcccttttgattttttgtcataagccagcttgtacgcaccttgtacgcaaatttcccgacttggattgcagcccttggtcgggattttctttattgccgtctgacaggaacctctgtttctccatggtcaaaagtcatttgatcaatcgcacagagtaactgctcgtctgagattcgaagatacctggcaacgagatcaggcaccaacttattcttgctatgcgtcttgggtcatgacgatagtctttcgaaaatacggggtcttctacgctaagaggcggtaattagttatccgatccgtttggatactggccagctatttgaaaaaccctcggaattgagcaacgactaaagccgtgtagtggctcagagcacgcaagacctcaacgacgggggctgtttggtggatggtctctacggagacgactgctataacagagtaatctcccctgaccgacttgatgggtcgattagtcttatattccatgagcacaacgccgggttggagaggccctaaccagacaggagtatctggtggtaggttcgcttttgcatcttcttctgaataaaatgtcaccttgccactatggctcatttcagtaggggctataagaacaacggatggaacccgatgcttgtcagcattactcagccactgaaggagtataagagcgtcgcggtctggagtactcatctcctcagacccatcccgctggaatggttgaaccagctcgattagctctcgagcggtatctggcatttgatcgagtttggcccgaccacttttctcaaacattgatctatcttgatagatagggaacgcgattgccgagggcttacttggtgggtcatgccgaagtcgcgagagtgcgaaggcaaggttgtcaagtgcactacggagattgtgaacacactcgcctataagaagtccccaatgatctattggggcattctccgcgaagtcctgcacaattaggcgaaaacctagcctcccctcggataactcacaccgagcagtagttggattgctagaaatccatgatgatatctgatcggtaagcgagcggatctggaaatcagcacgcgccagcttcagatcgaccgaccttattaagtcctgcattcgagatactgcaccgagttcgtacaatgattagatggtctgcataagccatgaaaaccagaccgtttccttctgtataggaaggtcccgcttcttcttgtacggtcttgtaatatcattcaaattaacgactgtccagattcgtgccccaaatacttcctaggcatcttggggcgatgtcgctcggcacgtcctgcttatttatctatccgaatttatacagattctcccacatatcccgctggtccagtgtcctacgcacctctgcgccagctcgccgaacaaaatcatttctccaaaaaatctgtgttcaatcgagaccgctttgggctaaactctacatgctccgtcccgaaacgtttctactgatactgtaacaggcagtcaacatgataaccctggctatagattacggtgcttcaaatgtgggtatagctctggtcagaaataccgaagcggggaatgaaccgctgttcgctggaactgttatcctcgatgctaggaagctgaaggaaaaagtggagacgagggctggcattagagggttgagaaggacgagaaagacgaagaatcgacggctcagagaacttggtgaagccctctcgggcttaggcatggagggagacaaggtcgccagaatagtccggttctcgaataggcgtgggtataagtctctgttttcagacccgaacgaaacggaaaaggtggacgaggctgaatcggcataccgatgcactagagaacagtttttccaccaactggaacaagaactgcaagagattctgagcgaccgtgaggcttgcgacaaagcactctccgtctgtgaaagaatactcaaccgcaagggggaccgatacgctgaaatcagattgataagaattgataatcggggagccagccgctgcgcatggggggattgcaacaaggtgaccccgaggcgggacaacgctactgacgatgcaattgcccagcaactggtcacgtattttcagagtgcaatcaagacggaaccccacaagcttgaaatgctcaaccaaacggtttgtgaactcgattcgatttccaagaatctccgaggggctattgcaaacaacgacgattcttcaaagaagatactgcgcaggagggcaagaaagagtctaagaaatcttagagccgagttaccaagcaccgaacctgaggacgtctcaggcgacgcgtggaagtatgtggaaaagggtattctgaacacccttgagaacagtggcggcaggaaccgttactgcagggaacacagcaagtcctacgtggaaaaagttctggaagggaagccaccagagttcaagtctaccattgcagattctgacattatttccagacgggaacagattgcgttcagcaagctctggagatacatagaggcgcgactgcttcctctcgctccgaagggaattgaccgaattgttgttgaacgaactgcgttcgaccttttagccggtaagcgaaagaaaattagagacgcctccagcgaaggtgtggaaaatatttatcagtacggccccatgtatgggttccccaatgaaaaggagatgctgcgaaaggaattcggagggctatgcgcttactgtggtaatccgtctgatacactcatggaccgagaccacatcctgccgaggcgagatttcttcttcgatagctatctgaacacactacccgcttgcccgacttgtaattcggaaaaatcggcgagtcttccttcccaggtctcacttcgaataagtgaggacgcctattcaatgtacaaacagtacc

SEQ ID NO: 129 - DNA, 5222 bp, Artificial Sequence
  Synthetic
attggtttgcgccgccttgcgatcatagtaactgcgaaagcggctgttgaagcggcgtgccatctgagcagcctccgtaaatgcccaactcaaatagcgattgccgttttttcggttgccactgcctttgcttttgccgtcggatagccgttgggtggatacgcagcggcagtaagaggcaaaattgccgacgttagcaaaacggcggatgtcaccggcctccaacataatggtcatggccagaattttgccgatgccgggcactgtcagcaagcagttgaacgcttcggtgagctttacctgtttctggatggccgcctctattctgccaatctgctgtttcaaaaaaacaatgttgtccaaattggcctgcgcggacagaaccaagtgctcctcttttaaccatcgcttcagatcctggcctgttaccttgcgcagttgactggagctgactttttgaccacagcagcgcgcaagcagtgattgcaagctgaggatgtgagcagttctctgctggaccaagaacattcgtttgcgagccaagtcccgcaccggccgggcttctttgggataaatatagccttggggaagaatgcccaaaatcagcaactgggccagaaagaaggcatcgtgttgatcatcgctatgcttcaatccctcatattgcttaatggcggatggattggccagatgaacgcacgaatacccggcatccattataccgtctaccaaccagtaccaattgtatgtggactccaccaccaagccccggagtcggtcacgaaacggttccagtgtctgcaaaatgaggtcaaggtcattgcagacacgtttcttgaagatgcgattgaactgtgggtccagaaccccaatgtaggtgttgcttgaatgaagatctaacccggcgtataggctcatcgggcacctcctttggcttgggtggttagttggccttaaccgcctttagcaaatcgcgttctgttacgcgatgggaagtgccttttagatgattatcacgctatcgatacctcgacccacctcaggattcgtttgatttattttgcctattgcaacgggggcgggggctgcgatattatccaacatcaccgaagcgtcaaatctgtgatattttttcagccaagttgcatttttcaggaaagcaagaacgcgctggccaaagcgatggtaaaatgatggagtcatacaatgaaaaacaagggtgactgaccaattccccctcaccacgcgggatttctgtcttttattgcagtctttatcgagatgcgcgatcgcggaggcgttaccgccatatcacgccggggggccgggaacccctcccaacccaaccccctgtattataacggggggccggtacgaacggttgcaccaactcatgcctgccctttttgagaggaatctccttggccgctttcgattcatgccgggtctatggcgtgtgagttctggctgtttcagcatcaaaatgataacatgtaaaaagctttaacatgtattggcccctatccgcttcaaggtctgaaagatgccttcaacgctcgctattgacttcggctccaagtacattggtctggccttggttcataatgaagaggacggtcggaacacccctcttttcgcgggcacatttaagtatgacaaatttttcctaaataaaaaagttcaaccccgagcagccattcggcgggttcgccgtaccaggaaggccaaaaagacccggctgaaacgcctctatactgcattacttgcactccgggtaccccgagaacaaataccacccataatcaggttttgcgctcggcggggctacaagtccctgtgggagaccgacgaaaaatccggcggcgaaagcaagggcaatgacaatattgtctaccattatggccgcgaggagttctttgcggcgcttaaaaccaaattggaggacagcttgagcgagcaaaatgctcgcgattcactttcggcttgcgaacagattctgaactgccatggggatcccaaacttgagattcggccagtccgcatcgataaccgcggcgttatccgctgcgcttgggatggatgcaacaaggttacccccaggctgtccaatgccctgcaggacacgcttgcccatgtcgtattcacggtttacaatgaacgaattgcgaaagagcctcaactgcaggccgccattgtggcgatgttggatcgtattgccgatctcgggaaaagatatcagtcggtttcaggtgctgacccggctgctgagaaaaaagccttgatgaaacggatccgggccgaattcgcgatcctcaaacgttggtttgccgcatcgccagaaaatgaggatcaggtgagcaaatggaaatatatcaaaataaatcttaaaagcctgattacgcggcaagagggccgcaatcggttttgtcgcgaacacagtgccgagtatgtgcaacaccttctcgctgggaaaccaattcagttcaaggaaacgctgatcgagcgagatattgcatcgaggcgcgaggaaatcctcttccaaaaactttggcgctatatcgaggcaaggctgttaacgctcgtcccaaatcacatcgacagaattattgtcgagcgaaccgcatttgatctcttgacgggaacgcagaagcaacgacaaaagatgaccgaaaaaacattcgaagaaatgtatcaaagggggccgcggtacggatacacaaatgacctggaaatgcttaaaaaagagttcgcaggtctttgcgcctactgcggcagactatctgggcgtctgaccgagagggagcacatcctgccccaaaaggattttttctttgacagctacgttaacatcgttccggcctgcgacacctgcaatagtagcctcaaaggaaagctatctgggggcgccgttggtcttcgcattcatgatgctgcctatgaggcatattcaggctacctgcgctctaaatttaaaaccaacccgcctcatatttatcaaaggataaaaaagggcatactcaatctcatgaggcagcctgaccgcgtatgggaggccgagaactatctcgctcttatcagcaagcaacttgtcgaaactgtccaggcccagcgtacccccctaccactcgcccggtacatcggtggaaaattaagaaaggttcaggtgcagtcccccaagatagagttccgcagcggacgccacactgaaatttggaggagggccttgtaccctgaattcgataaacttcgagacagggaggatggcgggctactaaattacgctttggctgcgctaattatggcgagtgatctcccctcggttagcgctctcaaagcaaggcacctcaggctcaaggattggaacgagtggaaagccaatgtggtgacccgagcacctcgcgcggcgacctccggtatacctcacatcaagttgccgtttaccccagtgcccggtttcgaggagattatccccggaaattatctcattttggatctcgcactgttcaactggaattgtaaggatcgcgggactcataaacagaatccgttcggttggtgcggacccatgaattgtccttccaagcgcaaaaacgctgctgaattggtggcggaattctcgagaattgacaatatattagagactgccgatataaaacgagaaaagacttataagctcatcaacttggtggcgcatcctaatctccgagcgcatctgtttaaggttgttaactgcgaaacacccggcaaagcggcggctgaggcattgatggaatggttgcgggtttctgttaagaataccctcccgcactccccgatgagcaaccatccgggtgacagagctcggcattatgatctttgcaaattttccgaagggggagcggtacccagtgttatcggtatccgcaggcttttccccgaccgtgcagggaatgtcgacctatgtcgtgcaggtggtgaaaatgatggaattacgcatcgttatcagaccgatccaccaaacatcgggtatgtcttggcttatgcctccaaaaagggtatagtagatagaaaaaatccggttattcttgagatcaggcagagcggcgaattgcgcatccggctcggcaagaaatatttttcagaaagcggtgcggagcccctgttaagaggccgtattttaggccaggggaatgagattgactccaacaaatggtcgcaggcattaaaaaccaagctggccagaaacggcttggtcgagtatgggatcgttaccccagggtgcgtgctgaaatattttgataatgaagaattatttttgcgtaattttagccatgattacggatttaaaaattcaattttgaaaaatgtagtgggtataaagcggacgccgcttgatcagaaatttcgaaatttaatttcattgtcgtagtagcaatctactgttcgctctttggaaattttggatataacaggttgcggttgaaaagagcatcaactgcaaggtccactccgggatagggcagtttcggctcttggatttcccttggcgcaagctctgggaaaaaaccttgcagttcatgatgtgagcccatttttaattctgatgcatagttttaagcttattagccttaacggtaatggaattgttcaatctccgttacggcagtatttttcaactgtagcgaataggaaatatttcaatcaccctgttaaatctcttcgggttatattcctcgaagcttgcttcgataaaacggataaaatccctaatctgaaaaagaagaaacccgctactgcccggccatagtctccggtcgtcacccggagcgacggtcgacgacgatgatttcagctccgtgacgcagctccgtgctcatatcataatacatcttcattttaccaacaatgctctaaaattcaaaaactaattcatccattgagctcgaacaaaatatgaccatcctcggaaaaaagactttgggtataattgttaatgaaagcttgccaaagattacgtttatcggctgacagccgacccaggatgaacttatcgaacaaatcataccggatgatcacatgcgtgaatccattttcacgcaacattttggctaaagcctccgctgaagcgaccgatcggatacccgcatccagagtgccatcaaaaatcagatcccggtcacagtaatagcgccggtttcccaaaaagatacccaacacccgggcatctggcggcagatgacggt

SEQ ID NO: 130 - DNA, 4415 bp, Artificial Sequence
  Synthetic
gtatattctttggagcgaaaaaccctgctaaaacctcgtactatgttcgcgtggacgatgatcccaggctgcttctcgtagcggacaccttgaaaaacagtgtcaacaagacggcattcgacctcagggacaagaccgtggttgctatagcgcctgaggacgtggaccgtctcgtcattgtacatgaaggaaaggaaaccgagctgaaacgacagacctccgacgcctgggaaatggtcaagcccgaggtcatgaaggcaaagagcagcctcgtcgaaggcagcatcaaaaccattaccgggctcaaagccactcaaatcatcgacaatcctgtcaaggacggcgatgaatacgggctggccaagtctgagacaagcatcgttctcgccggaccgaagctggaacaaacactactcgtaggtaaagcagtgtcatccgagaaggacaagaactcgcaggtgacgccggacagatatgcccgagtagcgggccgagacacggtgtacgcgatcgacggccggacggtgaagaatctcaagatcgaaccagacgcactgcgtgatcgctccttgttcgccctggttcccaccgatattgaaaagttcgagctggaactcgaaggaacgacctgggctgccgcccgtggcaaggacaacaagtgggatcttgaaaagcccgaaaagaaggacaaaattgaaacatggccagtgaccggtctactctggaccatcaaagacatcgcgtggaagtcgattatacgaccggccccggagaacctcgcctcagtccatcttgataagccgcggctcgtagccgccttctggaaaaagggggagaaggaccccaccgtcttcaaggccggttgggagaaaaccgcggctcccgcggcggacacgaaggctgctgataagccaagcgatgaaaaaaaggccaccagtgaggagaaggaagcaaaactgcccaagcccccggcggatgaaagtgaccaggcgcctcaattggtgaatgccacggtccagccgcattgggaaaaggacgcgatcttcgttctagacggcgccttcatcaagcgtctgcgcgatggtctgaaacgattggcggaaaaggagaaataggcgtggccgactgactagaccggctgagaaacgttccggcccgttcctcatggttttacgggtcacaacgccgccccatcgccctctcattgcgataagcgaaacgaagaagcaatcccgttccgtgacgggtcaatctaaggagattgctgtcctgcggtcgcaaggacaagctcgacacaaacttctttccacccgaaattgaaaaggtactgcacgcggaacctttccgttgacgcgggcctgcccccactgctatgctcgcgttcagacgcgctgcccctatgttcctgcactcggtcacgagaaagggggctctcagtcacatgataaccctggggatagactacggcgctgcctatgtggggatcgcgctcgttcggaaccatgagaacggacacgacgagcccttgtttgccgcgacgatggtgcttgatgcacgacgactgaaggaaaaggtcgaaaaccgggcggccttgcggcggttgagaaggacgagaaagaccaagaagaggcgtctgagagaacttaaggacaagctgcttcgcctgggacttgccccggaaactgtctcgcagattgtcaatttctgcgaacgacgcgggtacaagtcgctctttggccaagagggtgatcctgatgacaagtccagggacgagctaacctatcgcttcacgcgagaggaattcttccaaaccctggaaggtcatttgagccgccttcttctctcgcctgaggcgaagacggcagctcttgcaatctgcgaacgggtgctcaatcgtgccggtgaccgccgcctagaagttcgaccgctccgaatagaaaatcgcggggcgagccgatgcgcatgggagggatgtgacagggtcacgcccaggcgctccaatgcgatagaggatgcgattacccagcagttggtcacgtactttcagagcacgctcaagcagcaccaggatctgcttgacacacttaaggttgccactgctgaaatgggccgcatttcgcaccagttaagatcggccgtggaaaaaggactcgcccctgaagtcaaggctttgagaaagagagcccgagacgtactcaaacgacttcgcgtcgaattcacagaaccagaggcagccgaggagaacgacgaaaaagcctggaagtacgtcaaagaaggaattatgaacatcctggagaaggcccgcgggaggaatgcctattgcagagagcacagcgctgagtatgtccagacagtgttggcaggaagagctgtcccgttcaagaagaccattgccgagtgcgacatcttgtctcggcgcgagcagatagcgttcagtaagctctggcgctacatagaagcgcgggtcttgcccctggctcccgaagggatcgaccgcattgtggttgaacgtactgccttcgatgtccttgccgggaatcgccggaaaatacgcactacatccgagaagcgtgtcgaggagatgtaccaacaaggtccccggttcggtttcaaggacgacggggcgatggtgcgggaggaattcggaggcttgtgcgcgtactgtgggaagccttctcctgatttgatagagcgcgaacacgtcctgccgaggagagatttcttcttcgacagctaccttaatatcttgcccgcatgccccgactgcaaccggcagaagggccgcagtcgtccaggcagcgccgctctgcatatcagcgaagaagcctatgcgaactatgaccgatatctcaagaggatcgctggacaaaggccggtgcactttctccattacgagaaaaaaggaatcctcaatcttatgcgagatcccaagcgggcgtgggacgctgaacgatatctgggactgcttgccaataatttcgctgccatcgcgcaaagccagcgcggcccgcggccgtttgctcggttgctcttctcgaagctcgccgcgcgtcagaataagccccctaccataagtttcttcagtggacgccacacggccatgtaccggaccatcgcgtaccccggattcgagaaacacaaggacaaggccgaaggcggaacaatgaaccacgcgctcgacgcagtcctgcttgcgtgtgaactaccgaacgccagcgtactggaagcacgcggcatcaacgtccaggatttggaaacgtggcggcgcagggtccgttcccgtgcgccggttccggggaaggatggcgtgcccgatattcccctctatgaatggtgcgttccgggctttgaagaggtcggactcaatgggtacgtggaagtacaaatggccgccatgaattggaatcagaaggattcctcaacgcacaagcaagacccttacgggtggtcggaagaatcaaacaagccaaccaaaaggtcatctgcagtcgaactctatgaaaaacttatgaacgagaaggctgacgagaaggtgaagaacatcgtgcagactatacaccatccgtcccttcgctcggccatgtcacagggcttgaaagcccgtccccccggccccgcggttgccgaggccatgaaagaatggttgcgaaaatcagtacgaaatagcctcggcaagtcctcttgcacaagccaccctggggacctgaggaggaggacggatcttcagaattttgccgagaaccacgatgctaaaattccgcgcgttatcggcgtcaagcgactcgacacaggagttcaaggaaagatcgagctggagaggctcgatccaatgaacggcagaacgctccatcgctacatgagcgatccggtaaaccgggaagtcctcttggcttatcgcgtcgggtcaaatggacaacctgactttctcaaacccttcaccgtgaaggtgaaacaaaatttggctctgaagaccgacctgcgaacttttcaaccaattccccctgacttggcatgtggagtaacctggggctcggctgcgtcactcggggatggctggagcagcaagctggaaacgtatctatcggaacgcggcttttgtagctatgcgcggatcaagccatgctgtgtcgtctgctaccaggacggctcgcagctattcataaggaattttgacgataacaaggacttcaagccatcaaagatcctgaaaaacgtggttggggtaaagcgaacgccgtttgctttaaggatggtccccttaaaggtgttgacgccgcaacgtccgaagtgataagacacgggcaatcgttctttgacaaatcgcttcataagatcagtaggttgaaaagagcatccgtccgacatgcactccgggatggggcagtcccggctcttgcggttcccgatgcagttat

SEQ ID NO: 131 - DNA, 15300 bp, Artificial Sequence
  Synthetic
gggggcgcgacgtggtgttgggcatcgcccgagacatcaccgagcgcaaggagctcgaacagcagctccagcaggcccagagactggaggtggtcggccggctctccggcggcatcgcccatgatttcaacaatctcatgaccaccgtcatcggcaacgcggagctcatcctcatgagcgtttccgaagacgacccggtgcgcgaggacgtgctcgaaatcaagaaagccggcgagcgggccgcgtccctcacccatcaactcctggccttcagccggcgccaggttcttcaacccaaaaccctggacctcaacagcgtggtgcaggagatggaccgaatgctccggcgcgtcatcggcgaggatatcgacctgcaaaccgacttggccccggacctgggccacgtggaggtggaccccggaagtcgagcagattctcatgaacctggccgtcaacgcccgggatgccatgcccgaaggcggcaaactgaccatcgagacggaaaatgtcgagctcggcgaagaatacgcccggtcccatgtcgccgtcacaacgggttcctacgtgatgctggccgtcagcgacaacgggatgggcatgacccgggatgtccaggcccagattttcgagcccttcttcaccaccaaggagctaggcaaagggaccggcctgggcctggccacggtttacggcattgtcaagcagagcggcggcaacatctgggtatacagcgagccgggtcagggggccaccttcaagatttacctgccccgggtggaaaagatggccagcggcccggagcggtccgagacggccatggaatctttccggggttcggaaacaatcctgctggtcgaggatgacgaaatgctccggaacatagccatcaagattcttaaaggacaaggctaccacgtgctggccgcgtcggacgggcgggaagccctggacctctgccaggaacacgatggcgtcattcatctcctcttgaccgacgtggtcatgcccgtcatgggaggcttggacctgtccaaccaggccaaaaggctgcggccgaacctgaaaatggtcttcatgtccggttacacggacaacgccatcgtgcaccgcggggttctggacaaaggcgtggccttcctgcaaaagcccttcacgcccgagcgcctggccaggaaactgagagaggtgctggcccagcggccttcgtgattgaaatcatcgccaacctcggctgcccgccgaactcactatcgggcctcggctcgaagtcctcgaatcgtaagggcgaccggccggtcgcccctactcggaatcctgtattttgctacggtctctaatggccgccgcgcggctgggttcaggtcaagcgcacccgcttggccttggccacgaattcctgtagattcgttctgaccgcgatcttgttgtatttgcccacgctggtcttgggtatctcgtccacaaaggccacgtacacgggcagcatccacttggtgatcttgcccttgtccactccctcggcctgaaggaacttcagcacgtcctcctcgaccgcgttgcttcccggcacgcgcttgaccagggccatggggatttcgccccacttctcgtccggcacgcccacgtaggtggcctcgagcacaaactccgcgttgctggtcaggttctcgagcaaaaccgtgggcaccatctccgagccgctgcggatgacatcggtgatccggtcggcgatggtgatgtagccgagttcgtccaccttggccgcgtcgccggtgtggaaccagccgccccgccaggcctcggccgtcctggccggttccttgtagtattgttccatgatccaatggccgcgcagcacgatctcgccgatggtctcgttatcgtggggcacgtcgtgcccgctctcgtcggtcacccgggcctcgatggccggcgacatggccaggccggtcttgaccatgacctggtcgattttctcctgaggccagaccgccatctcgcgtttgagcgcggcgttgatgacgccatcgaaggtctcggtcatgccgtagcccgagccggccctcatggacgggaagagtttttccgccttttgcttgagtcccaggggcagggccccgccgccgatggcgatgttggtcaggctggagaggtcccacttggcgatgtccttgtattcgaggatcatggccagcatggtgggcaccatggccgtgtggttcaccttctccctctcgaccagctcgcagaaagtctcgggcgtgaatctacccgggaagacaatcttggccgccgaaaacacatagtaaaacggcgcgccccaggcgtgaatgtggaacagcggcacgttcatcatgggcacgttctggttgggccgcggcggatcgtccggcagccgcacggccaggttcatcaaggccatgaggtggatggaatgcatatagacctggcggttcgtgtacagcgcgcccttgggcagcccggtggtgccggtggtgtaatagagcaccgcgtaggtgtcttcgctcatgtccggccaatcgtagattttgggctcgtccttgagcagcgcttcgtactcgtaaagcggcgcgatcttggtctccggcagtcccggctttacggacatatagacaaaggccttcactttgtccttgatgcggccatacagcgcctccaccagcggtttcacgtccgcgtcgaagaagatgaccttgtcctcggcatgggtgatggtgtaggccatgtggtccagggaaagccggatgttgatgggatgcgaaatggccccggaacagatggacgcgtagatgttctccatgtgccagtggtgattcaaagccatggtcgcgacccggtccccgggctgcacccccaggcgcttgagagcgtgggccaactggcaggtgcgctcgtgccactgccgccaggtgagccgcaggtactggccggcgtcgttccgatagaccatggcggtgtcatcgggatacaggtacagcggccgcctcatgaaattcctgagcagcaagggatagtgtttcgtgtactccgggtaaatggtcttctcggtcattttgcggtgtccctttctcgtgcggcctgcgcccgcaggcgatggttgccaggtgtccggctcggatggaagggtagccggtgccgttaacgccaagggttcatataatacaactctcaggctttacgcaagagttctgaggcccagtatttagttgtggaagaaagcgaaatctcgttgtcattgcgaggaagccgcaatctcgcgtaggggcgggtttcaaacccgcccgcattggagacgcgcccattgatgccatagggtgggcgggtttcaaacccgcccgcgcaaggtaccgtaaaagagactgaaattgttgtgtttcgcttcgctctatccaacctacagctttgcttcgctcgcagccacgcccttttcatatgacgccaaacttaaccaagtgttaggtcctggccgtatgcaaggcgcatggcccttgtctttcggctcggaaggcggcgaaaaaatccggcttgaccgggccgcgccatccttacatcttgacacaggccggcccttcccttatgctcccctggaaaaaagagatttattttaagcaaaccaatcggttatcaagcgactcgcgggtgagaaagaaagcagcatgaacatgcgtttgctggtggccaaccggggcgagatcgccgtacgaatcttgcgcgccgccgccgaactgggcatggccacaatggcggtgttcgccgaggacgacgcccaatcgcttcatattcgccgggcggaggcggcccaggccttgcggggccggggcgtttcggcctacctggacatggagcagctcttggccgcggccaaagaacacggctgtgacgccgttcatcccggttatgggttcctgagcgagaacgcggtctttgcccggcgctgccatgaagaggggctcgcctttgtgggaccggcggcggagacattggaactgctgggcgacaaggccaaggctagagccctggcccggcgcttgggtgtgccggtgctgcccgggaccgaacagccggtcagcctggatcaggcccgggcgttcctggcctcgctcggagacgaaggggccatggtcatcaaggccgtggccggcggcggcgggcggggcatgagaacggtgttccgcgcggatgaggtcgaggaggcatacacccgctgccgctccgaggcccggcagagcttgggcctggaccaggtttacgtcgaacaattcatgccccgggccagacacatcgaggtacagatcctcggggacggcgccggtggcgtaagccatttgtgggagcgcgaatgcagcctccagagacgatatcaaaagctgatggagatcgcgccctgccccagcctggccgagggtctccgcgccaagatcacggccgacgccgtccagctggccgaggctctgagttttcgcggcctgggaacctttgaattcctggtcgatgcgggcgaaaagccggacggggtcgggtacgcctttatcgaggccaacccgcggctccaggtcgaacacacggtgaccgaggaagtgaccggcgtggacctggtcaaggcccagctccgggtcgcggccggcgccgcgctgagggacctggggctcacgcaggcggacgtgcccaggccgcaggggtatgcggtgcaggcgcgcgtcaacctggagaccatggacagggacggtacggtgcggccggccagcggctggataaaatcttttgagccgccgaccggccttggcgtgcggacggacacctgcggatacgccggctatgccataagtcccagctatgacccgctgctggccaaggtgatcgggcattcccggtcgccaaatttcgccgaggccgtggccaggacctatcgcgccctgtgcgagttcaagatcgagggggtgcgcaccaacatcccgctcttgcaaaacttgttaaagcatccggattttgtcgccaaccgcatctacacccgctttgtcgaggaccacctggaagacctggccgccgaagacgccgcgcatcccaggctcttcgtcccttccccggaatcggccccgcgggcccgggccggggccaaggtggacgccatcgacccgctcgcggtcctggactacggcaagagcgaagaatttataaaacccccaaacgaaacggccccggatgaagaaccgccccaaacccacgactacgacatgaccggcctggaacacaccgtggccgtcaaggcgctcatgcagggcaccatcgtcagcatcgatgtccaggaaggagacctggtccgggagggccagcctctcctggtcatggaatcgatgaagatggaacacgtcgtcaaggccgaggtcagcggcctcgtggtccggctggccgtgtcccagggcgacacggtgtacgagggacaccccctggtctacatcgaggaacgggagctggagaccgaggaagccaagggaatggagcaggtcgatctggaccatatccggccggacctggccgaatccatcaggcgccatgaaatcctggaagacgccgcgcggccggaatccgtggcgctccggagacagaggggccagcgcaccgcccgggagaacatcgtggacctgtgcgatcccggctcgttcgtggagtacggcggtttggtcatcgccggccagcggctcaggcgttcggtggaagacctgatccagcgcaccccggccgacgggctcgtggccggaaccggctgcgtgaaccgcgacctcttcggcgaggaacgatcgcgctgcgtggtcctgtcttacgactacatggtcctggccggcacccagggcttgcagaatcacaagaagaaggaccggatgttcgagctggccgcgcggctgcgcctgcccgtggtctttttcaccgagggcggcggcgggcggccgggcgacaccgatcactcgatcgtggccgccctggacgtcatggcctttcacctcttcggccggctcagcggactcgtgcccctggtgggcgtcaactccggccggtgcttcgccggcaacgccgccttgctcggctgctgcgacgtggtcatcgcggcccggaactcgaacatcggcatgggcggcccggccatgatcgaaggcggcgggctgggcgtgttccgctccgaagaagtcggccccatgtcggtgcaggtgcccaacggcgtggtggacatcgccgtggccgacgaggccgagggcgtgcgcctggccaagaaatatctgtcctactttcaaggcccggtcgatcaatgggccgcggctgaccagaggctgctccggggcatcatcccggagaaccggctcaggatttacgacgtccgctcggtcatccagaccctggccgacacggattccgtgctcgagctcaggccgcactacggcctgggcatggtcacggccctcatccgcatcgagggccggccgctcggcgtgatcgccaacaatccgaagcatctctccggcgccatagacagcccgggcgcggacaaggcggcccggttcatgcagctctgcgacgcctttgacctgcccatcctcttgctctgcgacacgccgggcatgatggtcgggcccgaggtggaaaagacgggcctggtgcgccattgctgccgcctgttcgtgaccggcgggagcttgaccgtgcccttcttcaccatcgttttacgcaaggcctacgggctgggcgctcagaccatggccggcggcagcttccgggcgccgatcttcgtggtttcgtggcccaccggggagtacgggggcatggggctcgagggggcggtcaagctcggctaccgcaaggagctggccgcggtgcaagattccttggaacgaaaagagctgtttgataaaatggtggccgcctcgtacgaacgcggcaaggccatcaacacggcttcgcatttcgagatcgacgacgtgatcgacccggccgagtcccggcgcgtgatcgtgagcgcgctcaaggccgctcccaggccgcagccccgcacgggcaaaaagcgccccatggtcgacacctggtaatatacacaacgtcgttatatgatgcgcatgcagagcgtcggaacaaagcagaccaaggctgggcgaaggcgaggcatgaggcgtacttttcagtacgcttgagcgacgagccgaggagcaacacagggctaggaagttatggcgctctgtataatatccgccgaggcatcatcgccaggcatggcgagaaattaatagagaggagtcctgcatgacggaaaaaatggatggcctgctcagcccctatcgcgtcctggacctgaccgacgaaaaaggactgttctgcggcaagctgatgggcgatatgggcgccgacgtgatcaagatcgaacggccgggtggagacccggtccggaaccgaggacccttttatcatgacgaagccgatccggagaaaagcctttactggttcgccatgaacaccagcaagaggggcatcaccctcgaccttgaaaaaccccagggactggagattttcaagaaattggccaagaccgccgatttcgtcgtcgaatcctttccgccgggcaccatggacaggctgggcgtggggtacgcggacctcgagaagctcaaccccggcctcatcctggtctccatcgccccgttcggccagaccggcccgtacaaggatttcaaaggcccggacatggtcatgtgggccaccggcgccggtccctttatgcgcacctttgacagctacgaccgtccgcctttccgggtcagccaccacccccagacctatttccacgccggcaccgaggcggtcgtgggcgccatggtcgccttatatcaccgcggcaccagcggcgaggggcagcacgtcgacgtctccatccaggagtgcgtgaactggcacccctgcggcgactgggacttcaacaagagggtgcagaagcgtggcgcctttatgatccagatgaaggtcacggtcaagcacatctggccctgcaaggacggccacgtcatgtggcgctatacgggcggccccatggccaggcgacacagcatcccgctggttaaatggatggccgaggaaggcatggccgacgattggctgaagaatttcgaatgggacaagttcagccattacaacaccacccaggatatcgtggaccgcatggaagagcagaccgttcgcttcttcatgacccacaccaagacggaactgatgaccggggccatcaagtaccgcatcatgctctatcccatcagctccaccctcgacctggcggaaagcccccagcttaagttcagaggcttctggacccaggtggaacacccggagctgggcacaaccatcacctaccccggcaaatgggccaacaactcggaaaccccgccagtcatatcccgccgggcgccgctcatcggcgagcacaacctcgaaatctacggccgggaactggccatctcgaaagaatcgctcgaaacactcaaacgggacggggtcatctgatccgggctgttccaatacgagggagaacgaacatgggcaaactgccgtttgaaggaatcaaggtcgcggatttttgctgggtttggaccggcccgaccaccaccaaggtgctggccgacttcggggccacggtggtcaagatcgagagtcacaagaggctggacgtctggaggatgcagcccccgttcaaggacgacgtggtgggtccggaccgcggcgccattttcaattcgatcaacaccgggaaactcagcgtgaccctcgatctctcccatcccaagggcatcgagctggccaagaaactcgtggcctgggcggacgtcgtgagcgacaatttcgccggcggggccatgaagcggatggggttggggtacgaggtgctgaaacagatcaagcccgatatcatcatgatgagttccgccttgatgggccagaccggcccctggcacgacagcccgggctacggggaccaattgtcggctatctcgggcctgcacgagatttcgggctggcccgaccggccgcccggagagatcgggttctacaccgacttcatcgcgccgcgcttcaacgcgttgaccctgatcgccgccctggagtatcggcgccgcacgggcaaggggcaatatctggacatcgcccagcatcaggggggcgtgcaatacgtggcccctcttctgctggactatgcggtgaaccaccgcgtggccacccgggagggaaaccgcgacgcttacgcggctccgcacggaagctaccgctgccagggcgaggaccggtggtgcgccatcgccgtctccaccgaagaggagtggcaaagcttctgccgggtcatgggcgacccggcctggaccaaagaccccaggttcgccacgcttcaaaagaggcaggaaaacgaagaggagctcgaccggctggtgaatgagtggaccatgaacctgacggacgacgaggtgatgctgaagctgcaggcggccggcgtgggggccgggagaatcggcaccacccaggatcagatggacaacgacccccagctcaagttccgcaacttctaccaggaaagggaacacccggaactgggcaagtatcatcctccccggcagccgtgcgtcctgtcgaaaacgccctgtcagatcaaacgcgcccccctcatcggcgagcacaacgagtacgtcctcaaagaaatcctcggactgagcgacgaagagatcgaacccttgatcgtggaggaagtcattcagtaaaaatccggccgggggttgggaaaccatctccgggccggcgggacttcgaggccggggcgaggcgcgggagcctcctcccggcctcttttcatcaggcgacaaatgggctgaaccgcccttccagcgtttcatacttgaaatcatagcgccctctgcggtatcatcgctccaacccaagacatgctggtctgtgaagggaaaccatgcccgttacactggccatcgatttcggctcgcggtttatcggcctggccttggtgcgaaaccaagacggccacgacgaacctctgtttgccgggaccatcgcctacaagccttccgacctgagaagcaaggtcgtcgaccgcgcccagattcgacggattcggcgcacacgcaagacgaaacacgcccggctacggagcctcgagcatgggctgcggagcatcggggtcccgcctgaggcagtgcagagcattgcccgattcagccgccgccgcggctacaagtccctttggggggaagagaaggacgaagaaaaggatcaggatggtcaggaggaggaaaccctgtaccggttcagtcgggaggttttcttcgaggcgctggaggcggagcttttccgagtcctgcccgaggggctcatggcgcaggcactcgaggtctgcgcacgggtgctgaatcggcccggcgaccgccggctcgaggttcggcccctgcgcatcgagaaccgaggaaaaagccgttgcgcctgggagggttgcgagcgggtgacgccgcggcggcacaacgccctgcgggacacgctgtcccaggtcgtctataccaccttcaaggccgcggtggagaagcagccggagcttaggcaggagctggacggccggctggaccgcgtggccgagctggccaggcggtaccgcaacgcgggtggtgcaaatccagccgaggagcgcaaaacgctgctcaaaagaatccggacagagctgtcggccctgaagccgctggccaaaagcgccgagacgagggaggctgacgcggacaaggcttggcgctacatcaaggccaatctcgaggacatcatcaaaaagcagaccggccgaaaccgttactgccgggagcacagcgcggcctatgtctcgcacctgttggagggaaagcccattcccttcaaaccgaccttgacggaaagggacctcgtttcccgccagcaggaggttctttacgccaagatttggcgatacatcgaggcccggcttttccccctggcgccggagggcttcgaccgggtggtcgtggaacgcgtggccatcgaccttgtggccggctcgcggaaacagcgcgagaagctcggcgatgcggcgctggagaacctgtaccagcagggcccccggctcggcttcggcagcgacctcgagatgctcaaaaaagaattcggcgggctttgcgcctattgcggccagcccaaccctggactgattcagcgcgaacacatcctgccccgcagtatcttcttctttgacagctatctcaacctggtgccggcctgcccggcgtgcaaccagggccgcaagggcgcatccacgccaggaccggccgacctgcgcatccacgaggaggcttacgccgcttataccgcctacctggactcgatttccaagagcaagccattgcaccttttccatacgatcaaaaaaggactgctcaacctcatgcgggagccggaccgggtctgggaagcggaagcctacctggcgctggtggcgaagcattttgcgaccgcggtgcagagccagcgcggacctcggcccctggcgcggtacttgggcgaaaaactgagacagcggcaaggccggatcccaagcgtggcctttttcagcggccggcacaccgaggcctggcggcgggcctcttacccggactttgacaaggccgcggacaaggcgtccggcggccggatcaaccatgccctcgatgccctgctcctggcctgcgccctgccctcggtggccgcgctggaggcgaggcacctgcggagccgggacctgacagcctggaaacaggcggtgcaggcgaaagcccctcagcccggcccgatggggtttccggagctcccgaagttggtcaaaatcgtgccggggttcgaggagccgctgccggggaactacgtttcgctggacctggccctgttcaactggaaccggaaaaacacggccacccaccagcaagacccgttcggctggcaggcgcgaagcgacaccccggtaaaacggggcaaggcccaggacctggcggccgcgttggtgaaaatcgaccgggacaagaaggggtccctcgaggaccggcagaaggaagtcgttcggctgcttgaaaggctggcccatcccaacctgcgaagccatctcctggccggggcggccggggacgcgcccggggagcaggcggccgaagcgctcaagggctggctgcggaacgcggtggcccatagcctgccgcggtcgaagttttcgagccaccccggcgaccaggcccggaaaagggacctgctggcctttgccgagggcgcggcgccggacatcccggcaatcgtcggcgtgcgggaactcttcccggacgtgcggggcaaggtggaccttcaccggcgcgatccgcggaccggcggcatcctgcaccgttacatgaccgccccgtccaacatcgcgctcattctcgcctacaagcctgacagccgcggcggcgtgaaccggaaaaccccgctcctgctccaggtgcgccagagccgggccgtgaccgtgctgaaaggcgggcgctcgctcaagcccgtgccggacgggcctcttcagggccgcgtgctgggggacctgggcggcggcccgaagatggccgcatggctggaggcgtggacccaggcgctgcaagagtacctggccgtctgcggcctggccgaatacggcttcgtgtaccagggctgcgtgttgcaatacgaaaacggagaagaacggtacatccggaacttcagcccgaattacggcttcaagcccaagctcctccagaacgtgaccggcatccgacggtccccgctggcaaccgcgatcctgcctctggaaaggctggacagcggcgcgcaaagcggttaagatgcatcaaatggttctttgacaatggaatagccgtttcaggcaaaggctgaaaagagcgccggcctggcaggaccactccggaacgggcaattccggctcttggacccccttggcttaggctctggggaacatccctgcccggcgcgtcctttggacacggcgtgagccctatttttctttcatgctttaagggtgatgcgggccttggcctgtgcttctctgtcgtctcgaccccgatggaaccgtcattctggcgaaagccagaatccaggaatttgagttcaggtcaccctgaatatctcaacctcgttgagacggggcgctcccggcctcacggcttagggaatctcggtttcagtcaccctgaatatctcaacctcgttgagaccttttccggggcgttttccagaagcagtctcattcgtttcagtcaccctgaatatctcaacctcgttgagacatgacgatcaggccgaggccgaggcgttcatgggtttcagtcaccctgaatatctcaacctcgttgagacgtgatcgggcagcggttactcgtaatgttgttatgtttcagtcaccctgaatatctcaacctcgttgagacggctattccattttaccgaataaatccacccgattaaataggcggatgcgcgaaccccctgcctgtcggccccggaggagcgaccgcaaaccgcacctgggccgaaatttattcaaatcaaacggtctcaatagtgccgataggcctccacgtccggcacttccatggccccttccgggcacagctcgacgcagcagtaacaggcgatgcaatcgtcgctgatatgaaagtccggctcgagcgtaagggcgagggcgggacagttcaaggcgcaatccccgcactcgatgcatttttcatcgttgcgctgcggcttcaccccgatccgggtggccatcatgcccggcggatacagcttccgcatctcagcccggctttcttcatccagggcggcggcctgaaacgtggacggcatcttgaaatccgggatttttatcaagtcgccctggatgaccacgtcccgttcgtccagggcgcccagcccgcgggccagcccctccttttgaatgggcagaagcgccgggtccacgcccatcattctggccatgacgctgtccagggccagggcatcggtgctgccgagaagcttgcccacctttctcagccggcccccgtggcacggaccgttgccctcgatggcggtgatcgcgtccaggatgttcaggtccggcggccgcacctgaaagacgtcgcagaccgccctggcaaaaacctccggcgttctggccatgacgtgaagccgcgccttgcaggcgccggccacgtagccgaaggtgttcttcatggccccggtgatcatcatgccggcgtgggtcttgaaaatggggaggttgatgacgaagtccgcgtccagcacggccctcgagacgatcaagggcaggccggtcgccgcgccagtcctttccaccacctgctccgaaatgggaagaaagcggttctccgatgcgtccaggatgccggtgatcttggccacgttgcgggaactgcggttgatcccgcccgggttgtcgccgaccgccgggttcgcgcctcggtccaggcaggccagcacgaccgcgcgcaccagttccgggtgggtggtgtggcccagctcgggcggggacggcccgaccatgttgggtttgatgaggacccggccgccggcaaaggtgcgcggcgcgagccggtccatgagtcgctcgaccgtttctcttaagtcctgccccacattttcgatcatgacgcgcgatctatcgacttgagtcataagacactaccttgctatcgatggtttggatgccgtcatgatattttacccggtgcttttccgtcaatcccatttccttcttcacgcggaaagtttggccgcaacatggtcaattcctgccacggcgggtcatttgccatggggatagacccgctttgcccggggccggcgtttcatacttgaaatcccagagcccctgcggtaacatgcctcccatccaagacatgcaggcgcgtgaacggagaacatgtccgcataatgacggtcaaatgacctggatggaaatttcttggcggagaaggataaaaaactcaacgtcaacatcgggagggaaagagaaatgtcagtcgaagggaaatggaacttgaaaatccaaacacccatgggggagcagacgccgaccttgactctggcggccaaggggaacgcgctgagcggcacctttgccggcgcgcggggcacggcgaatttcgacgggggcacgatcgacggcaacaacatcgcttttacggtgaagatcgaggccatgggccagacgtt

SEQ ID NO: 132 - DNA, 5711 bp, Artificial Sequence
  Synthetic
ctcgccgagaaacccaaaaggatcgagctgcacggctcgctgacaatcatcgcgggcggaaccccggaaatcatcgacctcaccaagcgcctcacaaccgtggggaaatcaaacgattcagacataaagtgctccggcctactggtgggcaagacggctgccctgatcaacaaacgacccaacggatatttccttgcctacagggagggactgaaaaagccggaagttaacggcgaagcggttcatacccaagtgcaactccaggacggcgacgaaatcaccatcggaaataccagaatgacgttcaatctgcgcgaagagatcctgtaagagttcgccgggaaaacaaattaaggtcaaggagggtcatatgccggtaattcagataaatctttttgaaggccgatccaaggaagaaaaaatagccatttgcagaagcattcaaaaggccatgaaggaggcgctatcaatcagccacgacaacttccatcatcgaattcgtgaatttgatgactcaactttgctgattcctccgggaagatcgaagaattacataatgattgaattaaacatgctccccggaagaaacgaaaccctcaaactcgacatgttcaggaaaatagaagcaaacttgcagcagttcaacattgctcaagatgacattcttatcatctgtcatgacccggcttcggaaaactggtatatcagggggaaaagcggaaaagaaatgcacaagaagtaattggggatagcagttcgcttactccgaggaatttcatctgtgccccgaaagggcaacccaacagtagccgtgggtgtaaacccacggaaaacggcacgacaacaccccgaaggaccctggcggggtcctcctcaatccgtccgaaaccgttgaatcttcggtccaccccttcagggtaggtgatccagggttatggtagtacttctggtccacgggtttacacccgtggctactattggtacgccccttcgaggctcagatttctcttttgacccaggtaaatgaatgctcacaaaatctccgttgatttcatttcaaacttcggctaggttcatcaatactgcgtaacctgttcgttcccttggccaattcctatcgctgctctgacgaaatcggagggcattatgtgaccaaatggccggatgtttctgcaagtcagagcccttctcagccaaattcgcgctgaaagcgcgaaggctaggattaaaatcaaatgattacgctggggattgattacggcgcgtcaaacgtgggtattgcgctggttcggaataccgatgagggaaacgagcccctatttgctggaaccatgatcctcgatgcaaggttgctcaaggaaaagagtgagaccagagcggcttggaggaggttgaggaggaccagaaagacaaagcacagacgactaagcgatttgaaacagcgtcttctgtctttgggatgtgattcggatctggccgctaaggtaatcaaattttgcgagagacgaggcttcaagtatagagacattgagaaactcacagacgaagaccttgcctacggaattccaagagaagagttctttggcagtctggaagctgagttggataggcttgtctcgtctacgcaactacgtgaaaaggtcctcaaagcttgtgaagaggttctcaaccgaaaaggcgaccctcggcttgaagttaggcccatcaggattgacaatcgtggtgtgaacaggtgttcgtgggaaggttgccccaatgttacgcccagacgggaaaatgccaccgtggatgccctcatgcaggcattggtcaattatttccagggagcgctcaaggaagatcctggtctcattgatcatgtgaaacaagctgtggaccatctcaatagaattgccaaaccgatgagagtggctgatgataaggatgccaagaccgaggtcaatagtctgcgtcgagaggccaggaaaatattgaggagtctcaggagtgagctgactgaagttgacccaacagacgagagggccgcgaagaaatggaaaggcgtcgagcaaaacattgtaaatatggtcaagtccggtgaaggaaggaatacctattgtagagagcacagcagtgagtacgtcagcagaattcttgccggcaaacccattgattttaagaaatccatttcggaggccgatattatctccagaagagagcagattgcattcagtaagatctggcgatacatagaagcgcggcttctccctctcgctcctgaaggcatagacagaattgtcgttgagcgcaccgcctttgaccttatcaacaagaaaaaaagtagaagaggaggcaagaataagaagccgaccccggatcaggacgggatgatagaggaaatctatcagatgggacctatgtacggcttcgagagcagaagggaaatgctcacgacggagtttgggggcctctgcgcttattgcggcaaggcatcaggcgaactcgtcgaatgcgatcatatccagcctcggagggatttttttttcgacagctatctgaacatcgtacctgcctgtccgcaatgcaatgccgagaagagcaagaggcgactcaaacacacgtcccttcatatcaatgcagaagcttatggaaagtatgacctttatctcaagagtcttagaaccaaggggcggcctctgcatttcctgcattacgagaaaaaaggaattctgaatttgatgcggaatccggaaagaaactgggaaactgatagatacctcggtcttgtcgcgaataatttcgccgccatcgtccaaagccagcgcgcccctcgtccgtttgccagattcctttactccaagatttcggctcgtcaagacaaggacccaaagattgacttcagaagcggccgccacacagccctctacaggactgtggcctatccggactttgataaggcaagagagaagtctattggcggcgctgtcaatcatgccctcgatgctatgctgctggcctgtctgctccctgatctccacaaattggaagcccgtggcatcaacgtccataacctgggcacttggcgaagatcagtcctgtccaaagctcccaaagccgctaaggacggagtgcccgtcgtacctgctcatggctggtgcgttccaggttttgaaattcaggatgaaaacggatacgtgtcccttgaaatggcttgcatgaattggaaccagaaagattcggcaacgcacaaacaagacccctatggatggtccgaacgggcaaggaagccaaccaagagagcgtctgcgatagaactgtatgagaaattcgtgaaggagaagaacgagggaaaggtcagaaatctggtcgaagatatccaccaccccgccctgagaatggctatgactaaggcttttgaggccagcaagtcgggtcctgccgttgctgaggccatgaaacaatggctacaggtgcaggtgaagaacagcctgagcagttcgagcttcacaagacatcccgcggaccagcgaaggaagcaagccctggaaaattttgcgcagggcagcgacacgaaaataccgcaggtcattggaatcaagaagttcgatcgaggagtcgtcggcaaaatagatttggtgcgcgaggacccggaaaccggcaagcccggacaccgctacatggctcatcccgccaccaaagaagtgatcctggcatatccggccgcagcaaatggaaaagcagacctattgaagccatacacggttgcagtgaagcagaatttttcgctcaggacccagggcgaaaggatatttaagcccaagccgcaggaattggaggaaggaatagtctgggggcgagatgcttcaccaacgcacggctgggaagataaatttgaaagatggcttttggaatgaggttttcactcctacaccctgcttacgcgtggatgcgtggtctgttacgaagatggaacacaatggtttatcaggaattttgacgacaacaaggactttaagaaggccaaaatcttgaaaaacgtcgtcggggtaaaacgaaccccttttgcttcaagagtggcgcgattaaaaatattgacatcgggaagtcaaaagccttaaaaacaaatacaccattgatctttgacaaatcgtttctcgaatcagttcaggttgaaaagagcatctgtctggcgagcactccgggatggggcagtcccggctcttgcggttcacgactcagctttgggtcgttggaacacatcgtcagacacgtcgtaagacaagatgtgagcccgtatttcttgcgtatctgaaagaaactttgagtttcaatcaaactgattaagccgttttcgttgcggcttcgggccgtatggagattatgccgcccatgctaagtttcaatcaaactgattaagccgttttcgttgcggcgcgtactgttcaggcccaaacaagcgccttcaatgggtttcaatcaaactgattaagccgttttcgttgcggcaaactgccgaccaccccatgttctcgccagtagttgtttcaatcaaactgattaagccgttttcgttgcggcatgatagaaccgtcatgtggatatcaactcaaagagtttcaatcaaactgattaagccgttttcgttgcggcaggcgtgggataggctttggaacaatgcgttatacggtttcaatcaaactgattaagccgttttcgttgcggcaataagggggtgattcctgtgaatgatggccagggtttcaatcaaactgattaagccgttttcgttgcggcaccgtaagcgatttgtcaaagaatatccctatattaggggggttgttttgcgaacccctctgttcgcggcactgaaaacacctcgaacagcgcccggtttttgccgtatggccgtacaactcttctaatttccaacggaaataatttggtgcgaacctccctctgaattggcggttctcgtaagaggcccaacccatcaagatatagtgcaaaatttgcacagcatcttgacgttgcgcgcttgagagcttcgggttcgcatcggagtgcctcttgtatgcccgaatgcgtcatgcgctctcctggaatgcggatcaaaaacccgtattgaccactccggtcccgcgctttccatgcgatctcctcgatgagcgcgccttgagcatgaagatgaacagcagcactagaccagtcaacagcatggccacgcccaatatttgttgaaaacgcgaagactcccgtttttcaggtctctcgggcttcctcggtgaagacgctacgatgttcttctgctccggacccaggctgatctccgacgaggccgacgcgatctgattgacatttatggaggaagcttcacgcggggccggcaggggcctggcgctgggattatcaaaaagcaaacggtagttctgatccggttgatacttgaataccgccatgcgaacagcagcgttggcaagaaacttgtctacggcaaccgctccacggctgccgcttgacagctcaagcttaagatagcgaaacgtttgcggtctgaaccgcgcctcaaggttctcctttacggcctcttccttgcggagacgaaatagggtgccttcgaatatgggcttccacgaatcggaagaaggcgtggatgccccgtaaacagtagctctcttgaggaattctgccgctgttgacgagacccgaacactgcctacaggaaatcgcttctc

SEQ ID NO: 133 - DNA, 7671 bp, Artificial Sequence
  Synthetic
tcaattataggattagaactcaagaaaataatgggtgtgaaaaaggggcttatccatatggattggcccctttaattttttctggagcccacggacggatttgaaccgccgacccgctgattacaaaactaaatttaatgagttttctaaccccttgataactggtctggtttcccgtaagccattagaaattcaagggtaaattcatttcagtctattccagtctattctatctatttcagtctttttgattcaattcagtcacaatttagtcacaattctgtcacagtgcttttcggtttatcagcacgaagctcacccccatactatccctgttcagaccctgttcagataccatttccttcctgttgtagctttctcttccccaatctttggagatggtgtatatttcaatcaagagtaaataaactgacaaaaattgggcataaatggtaaattattaccattttccgctcacatttttaagagtcaaaataatatttatcattaaattcaaagcgttaatacaatcacatattatggtctgaatattgcttattttctgaatatcctccctatccatgtatgtatgttatttttttcttgacaagatattgattttttgctattagaccgctattcttattatagatgaattaagcccccatcgtcatacgtgacggtgggtaattaaatccccgccctcatacgtgacggcgggtttttattatacggagatgaaatgagtggcgagaaggtcatgatattcattgatggtagtaacttctaccataatttgaagactcatcatttcaatacaaatattgacttcaaaaagtttagcgacttgctctgtagaggacgtaaacacatcagaacctattattacaatgccccattaaaacaggcagatggccgtgaagagtatagaaagcagcaattattttttgatggtctcaggagaacctcatatcttgagttgaaacttggatattttttgaagaaaacaaaaacctgtgaagggtgcggtcatgttttgaattatcctgtcgaaaaagggtgtgatgttaatcttgctgtggatataatgagtatggcgtataagggtctttatgatgtggctatcttggttagttcggatggtgatttttcaagtgcttgtcaatgggtcaaggaccttggtaaacatgttgaaaatgcctatttcgaacagggaagttcgtggcatcttttgaatgtatgtgatgaccgtattctcatagaccaagattccattgacaagtgcatccggttgtaagctattttgagtgaagcataccttttactgcggactaactccctcccttccgctccgaccctcaaggtttagtgccggaatttataggcaaccacctttccaattcttattgacattttgttcccgttttcatacactctcatctaaattggagccctccattattaacccctaacccgttgggtgggtatgcagtcccgcgtaacactttctgtagattttggttataaaaacatcggccttgctttggtgaggaaccaggaaggaataaatactcctctgtttgctggaactatcctttacgacccctatcaactcagcacaaaggtaggaccgagggcagcactccgcagaggtcgcaggacgagaaagacaaagagacgccgcctaactcttttaaaaaggaaactgtttgctataaatcttcctgaagaaacaattcagcaacttattaccttttgcagacgccgaggatactcttccctctttgatgaacctcaaaaattgggccaagaagccaaggactcaaaagaggaaattgtttttcgtttcagtcgagaagagttttttgaagcactggaaaagcagatagataaactggtccccgatgaaaaaagggggttaaccctcagtatatgcgaaaacatccttaaccgagcgggtgatccctccagagaaatccgacaaataagaattaacaaccggggagcctcccggtgtgcctgggatgggtgcgagaatgtaacgcctcgccgggacaatgctcttggggacccgctatcccagttcgttcatacggtatttgccacaaccctcaggggtgacgaaaccctccaacaaggagtctcccaaatgttggaccgcatcgcggtattgggaaagcggctccgacatcgtggaggtcctaatccggataaagagcgtaagactctcaaggcaaaaatcagcgatgaactcaagctattaaagaagctgtatggcctaaaccctgatttgacagaagagaccgctactccatggacaaagattcgtcagaacataacgaacctgattgaacagaccggaggccgtaaccgcttctgtcgttaccacagctctcaatatgtcacccacttcttggaaggaaaaccgatacccttcaaggcaactttgacggaaagggacttggtatcccgccgggaagaaatcctctttcaaaaactatggcgttatattgaagcaagagttcttccccttgcccctgatggcattgaccgtgtgattattgagaggacagctttcgaccttcttgggggaagccgaaaacagcgtcaggggattataaataaggaagcccttgaggagatgtatcagcatgggcctcgatacgggttcgggaatgaccttgaaatgctgagggctgaattcgatggtctgtgtgtgtattgcggcaagccaaatactgaactgcttgaaagagaccatcttctcccccagtccaaatttttcttcgatagctaccttaataaagttcctgcctgtccgccctgtaatcggaacttaaaacaagccgcctccccaggaggggcttcactcaggattcacgaagaggcatacgatgcctattctaaatatgtggcttccaagtttagggttaaacctccccatctgtttcataccatcaagaaaggtatcctcaatctcatgcgagaacctggtcgcgtctgggaggccgaacggtatctcaaccttatcgccaaccagtttgcccaggtagtggggacccagagagggcctcgtccccttgcccgttatctaagcgggaagatttaccaaaagttcggggaaaagccaaagattggatttgtcaatggaagacacacctttctatggcgaaaggctgcttatcctgaattcgataagtatagagagaaaaaagagggcggtgtcatcaaccatgccttggatgcccttctgatggcttgtgacttgccagacctgaccacccttgaagcaaaaaacttgcatcccggtttgatgcattggtgggtcgataaggtgaggaaggctgccccacctgaaggtgctgatgggataccagtaatacctgaaccacggtttgccatagatggttttgaaaaggttcatcctggaaactatgttgaagctgatttagcaaaaatgaactggaaccacagggattctcaggttcaacgccaaggagcctacggttggtcaaaacagagggacattcctactcagcgtgttacagccgcgagcattgcggatgaacttcgtaaggctgacaaaaaaacatctcctgaatcaaggaaggccgaggtcgataaaatagtggatgggattgttcacccacaacttcgtaaaatcctgaaaggagcaaatactggagatacaccgggtgtaaccacagcaggggcactaaatatttggttacggaaagcgatcaaggggaacttaaacaaatctcaattttctcctcatcccgcagaccaatccaaggctaaaatgcttcagaatttcattacggccgaatctgacgtaatcccttcaattatcggtgtccaaattctctatccatggcttaaatccaacatggacttaaatcgagtcgcccctaaaaatggtcgccttgtgcatcggtatgtcgctgatccagcaaatgttgcttacatagttgcctatcgaaaaagtaatggcgtggtcaagcgagagaagcccctaacgcttgaatggcgtcaaagcggggctgtaattcctggtgtcaaattgtttggagatattcccgaggggccattgaaaggacgtccatttggcgagaaagccatcgaccataaagagtggaaaaacgctttgcatcgatacctgtctaacgcaggaatagccgaatataactttgtgtcacaagggaatgtggttgtttatgaggatgggaaggaatactatattaggaatttttctggaagctatgggtttagaaaatccttgttcaagaggataaaagcggtccgaccttcaccgctgacacagcgattgattccaaacgcaatagtttagaagctgtgattctgttctttgacaactggatagcgtgttcgggttcaagctgaaaagagcatctgtccggaaggaccactccgggttagggcagacccggtacttggacctccttggtcttttagactctggaggaaacctccggcgtgtcgtaagacaagatgtgagcctatttaaaatctatttatcatgaattaatctaccagtcaccctgaacttctcaactccgttgagacctggtcccttatctgtcgtcggatagatggggagtttcagccaccctgaacttctcaactccgttgagacatagtcaaggtctatcgctgataggagaaaggtttcagccaccctgaacttctcaactccgttgagacacaggcagttgtagatttggaggttaaagagcatgtttcagccaccctgaacttctcaactccgttgagacctatgagcgaaaaatatgcctgtagctatgcttggtttcagccaccctgaacttctcaactccgttgagaccaggataaagctctttgtgaaagcatccataagggtttcagccaccctgaacttctcaactccgttgagactgctatccaaaactcattattttttaagggtagatggaggggtgtttccgcgaaccctgtcctaattagtttttgagtcgatccttctgtttacccgttcacggtaactcccgtgaattattaataaatagatagatcgcgaaacccctacgctttgggtggttactggtggttcgcgaattgttggacccttacttacatcatcggtaaatgggagtgaaagatggaatctgtagttaggacaaaaaatgttagaagggcagaggcaattttacggtatatcattgggatcattttaatcatttttgctttttctattgaagggattttgcgttgggtaatcggattgatcggcgtggcatttattcttacgggcatatttggatactgaccctgaaaagggtttatgctgaaggtcttcagcaaataatgcagataatttgcccgtaatccatgacagaaaattagcctccctctacgcaaagaactggcaagaccacgctcaacattcggaggtctattccggtagaagtcggtagaacttgatggaacattcctcaatgcagagatcatcaagcaggcatatggatttgcttacactgggttctctttaagtatgtggaggagttcggacgggaagaaaggaagtgtgaaaagatgagttgggatggtaaagaatgggtagagctttcgataggtaaaaagactgagcttgtaattacaataattttagccataggaatatgggtgcttggtattatctattccccactggcaaggatgttaattgctggtgcaggattaattggattgggacttttaatagctaaaattcgtcagccaacaccgacagttcttgcttacttgtgctttgctctgtggggagtcggagggcttcttttgctaatcgctataatcaaatgggctaattggtatatggggttccgaataggttattgaaaacttgtggagagagaagtattcaccaaggaggagtttttggagatggtgaaggtagtggatcgggagatgaatagaaaaagagaaatgtaggaggaatgaaatggattttaaggaacagacaattattgaatatgtaaaacattgtcaagaagattattctaaaggacatgacctctacaaagagtattcaaaaaaaatggagaaaaaaggcttggaaaacttcgatgaaataaatcatgttgagatgattataaagccttatctgtataaatggggaagaatgcagcgagtgcttggacaaaaacaatacagaggatgggaaagtgatattgttgagcaggttcggctaaattttgacacacttgaaaattttagaaaaatgaaattcgaatcttcaaacctcatcgatcataaaacaaatattataaattgttatgaatcctttaataagattgtggatggcgtggcagcagcaaaggttcttcatataatttctccatacttcttccctttgtgggataatggtatatcagtgatcgtaagaaaagaacgtgtaagagccgcaattagtaatgaaggatttttaatagatattaaagatttttcaaacaaaattgaggacttttcgggaaaagattacttttattttatgaaaatattgcaaactattcttgagaaatataaaaatactttttccgttttggcaaaatcttatgaaaaaggagtattaaagattatggatgattttttgtggatgttggttcatgaatcactctgtatatatctttaaaaattatggaaattaatatatggaaaagaagaccaaaggaaagtctttagagatagggaaggtgacaaatcgggagacgaagaaagaaaagtgaaatgaaaatttacctaacccattgctcatccaagaaggataattcaataaaaaatactggtagaaaagtaactccagccaaattgtacaagatcatagggtcaggcatcggtaattcggtattgacaacgcagagaacattcatccttcaaattcgtccccacttgaagaacggatggtgtatggcgaggccattatacgccgatatctggtattctgcgtatcactcgattggaggggctccatggacagattattttttagggcctttagaggcccgagggaaattggagcccacggacggatttgaaccgccgacccgctgattacaaatcagcagctctaccactgagctacgtgggcatacttaacgtgtacgtaacacttttgtgtccgtcaattaaaaaccttcatatttttaccacatattttcagcaggatcaaatgctgcaatcctttcgaccattctttcactcatccctaccttcacccatcagagattgtttcacacttcgccgtttccccttcgacacgctaagcctgccccccgaacaaggtctttggcaggcgggggcgaacggccctgcctgccaaaccatgaacggatttggagcacatcctctcaaaagggaggggaattagggatattacttcccttcctcatctttccccaacagctcatcggaaattaaaatacttattagccatgtcaatggcagccggttttccttatttcggtcctgccagcagaaaaacgatggtccacccaaagaggaggactataaaagtgatgaactgtctgaccaatttgggatccataagaactccttctctctagagattgagatagattgccttttttcagaagatgatgtattgaacatgta

SEQ ID NO: 134 - protein, 5 aa, Artificial Sequence
  Synthetic
ASSHN

SEQ ID NO: 135 - protein, 10 aa, Artificial Sequence
  Synthetic nuclear export signal
  misc_feature (2)..(4): Xaa can be any naturally occurring amino acid
  misc_feature (6)..(7): Xaa can be any naturally occurring amino acid
  misc_feature (9)..(9): Xaa can be any naturally occurring amino acid
LXXXLXXLXL

SEQ ID NO: 136 - protein, 4 aa, Artificial Sequence
  Synthetic endoplasmic reticulum localization/retention signal
KDEL

SEQ ID NO: 137 - protein, 4 aa, Artificial Sequence
  Synthetic endoplasmic reticulum localization/retention signal
  misc_feature (3)..(4): Xaa can be any naturally occurring amino acid
KDXX

SEQ ID NO: 138 - protein, 4 aa, Artificial Sequence
  Synthetic endoplasmic reticulum localization/retention signal
  misc_feature (3)..(4): Xaa can be any naturally occurring amino acid
KKXX

SEQ ID NO: 139 - protein, 9 aa, Artificial Sequence
  Synthetic
  MISC_FEATURE (1)..(1): Xaa can be R or K
  MISC_FEATURE (2)..(2): Xaa can be L or V or I
  misc_feature (3)..(7): Xaa can be any naturally occurring amino acid
  MISC_FEATURE (8)..(8): Xaa can be H or Q
  MISC_FEATURE (9)..(9): Xaa can be L or A or F
XXXXXXXXX

SEQ ID NO: 140 - protein, 5 aa, Artificial Sequence
  Synthetic
TEFCA
